(19) United States
(12) Patent Application Publication
(10) Pub. No.: US 2021/0171948 A1
(43) Pub. Date: Jun. 10, 2021

(54) COMPOSITIONS AND METHODS FOR TARGETING GLYPICAN-2 IN THE TREATMENT OF CANCER

(71) Applicant: Shepherd Therapeutics, Inc., Natick, MA (US)

(72) Inventors: William M. SIDERS, Franklin, MA (US); Rajesha RUPAIMOOLE, Natick, MA (US)

(21) Appl. No.: 17/116,214

(22) Filed: Dec. 9, 2020

Related U.S. Application Data
(60) Provisional application No. 62/945,436, filed on Dec. 9, 2019.

(51) Int. Cl. C12N 15/113; A61K 33/243; A61K 31/535; A61K 31/704; A61K 31/4745; A61K 31/357; A61K 47/69

(52) U.S. Cl. CPC C12N 15/113; A61K 33/243; A61K 31/535; A61K 31/704; C12N 2310/344; A61K 31/357; A61K 47/6937; C12N 2310/14; C12N 2310/3231; A61K 31/4745

(57) ABSTRACT

The disclosure relates to dsRNAs and siRNAs targeting glypican-2 (GPC2) and nanoparticles comprising same, for the treatment of cancer.

### RELATED APPLICATIONS

[0001] This application claims benefit of, and priority to, U.S. Application No. 62/945,436, filed on Dec. 9, 2019, the entire contents of which are incorporated herein by reference.

### TECHNICAL FIELD

[0002] The disclosure relates to the use of siRNA based therapeutics for the treatment of cancer.

### INCORPORATION-BY-REFERENCE OF SEQUENCE LISTING

[0003] The contents of the text file named “SHEP_003_001US_SeqList_ST25”, which was created on Dec. 8, 2020 and is 845 KB in size, are hereby incorporated by reference in their entirety.

### BACKGROUND

[0004] Cancer is a proliferative disease in which the cells of a subject grow abnormally and in an uncontrolled way, in some cases leading to the death of the subject. There are many independent events and causes which can lead to cancer, and many different cell types and tissues that can give rise to cancers. As such, treatments developed for one type of cancer may not work on another type of cancer. Despite many years of research, and a plethora of treatments available to cancer sufferers, there is still a long felt need in the art for additional cancer therapies. Glypican-2 (Glypican 2, GPC2, or GPC-2) is a cell surface protein that belongs to a family of six proteoglycans. These proteins play diverse roles in signaling and cancer cell growth. Although GPC2 was initially thought to be solely expressed during nervous system development, GPC2 is also expressed on the surface of some types of cancer cells, such as neuroblastoma cells. The disclosure provides additional methods for the treatment of cancer by targeting GPC2 mRNA for degradation via RNA interference.

### SUMMARY

[0005] The disclosure provides nanoparticles comprising small interfering RNAs (siRNAs), wherein the siRNA comprises a sense region and anti-sense region complementary to said sense region such that the sense region and the anti-sense region together form an RNA duplex, and wherein the sense region comprises a sequence at least 70% identical to a glypican-2 (GPC2) mRNA sequence.

[0006] In some embodiments of the nanoparticles of the disclosure, the sense region comprises a sequence that is identical to the GPC2 mRNA sequence.

[0007] In some embodiments of the nanoparticles of the disclosure, the siRNA is capable of inducing RNAi-mediated degradation of the GPC2 mRNA.

[0008] In some embodiments of the nanoparticles of the disclosure, the sense region is encoded by a first single stranded RNA molecule and the anti-sense region is encoded by a second single stranded RNA molecule. In some embodiments, the first single stranded RNA molecule comprises a first 3′ overhang. In some embodiments, the second single stranded RNA molecule comprises a second 3′ overhang. In some embodiments, the first and second 3′ overhangs comprise a dinucleotide. In some embodiments, the dinucleotide comprises thymidine-thymidine (dT-dT) or Uracil-Uracil (UU). In some embodiments, the RNA duplex is between 17 and 24 nucleotides in length. In some embodiments, the RNA duplex is 19 nucleotides in length. In some embodiments, the GPC2 mRNA sequence comprises SEQ ID NO: 1 or SEQ ID NO: 2. In some embodiments, the sense region comprises a sequence selected from the group listed in Table 1 and Table 2. In some embodiments, the siRNA comprises a sequence selected from the group consisting of SEQ ID NOs: 3-232. In some embodiments, anti-sense region comprises a sequence selected from the group listed in Table 1 and Table 2. In some embodiments, the sense region comprises a sequence of CCUGCUUGGACCUCGAUAA (SEQ ID NO: 3), CUCAGUAGCCCAGCACUCU (SEQ ID NO: 4) or CUCCUUUCUGGUUCACACA (SEQ ID NO: 5). In some embodiments, the sense region comprises a sequence of CCUGCUUGGACCUCGAUAA (SEQ ID NO: 3) and the anti-sense region comprises a sequence of UUAUCGAGGUCCAAGCAGG (SEQ ID NO: 6). In some embodiments, the sense region comprises a sequence of CUCAGUAGCCCAGCACUCU (SEQ ID NO: 4) and the anti-sense region comprises a sequence of AGAGUGCUGGGCUACUGAG (SEQ ID NO: 7). In some embodiments, the sense region comprises a sequence of CUCCUUUCUGGUUCACACA (SEQ ID NO: 5) and the anti-sense region comprises a sequence of UGUGUGAACCAGAAAGGAG (SEQ ID NO: 8).

[0009] In some embodiments of the nanoparticles of the disclosure, the siRNA comprises at least one modified nucleotide. In some embodiments, the at least one modified nucleotide increases stability of the RNA duplex. In some embodiments, the at least one modified nucleotide comprises a locked nucleic acid (LNA).

[0010] In some embodiments of the nanoparticles of the disclosure, the nanoparticle comprises a liposome, a micelle, a polymer-based nanoparticle, a lipid-polymer based nanoparticle, a nanocrystal, a carbon nanotube based nanoparticle or a polymeric micelle. In some embodiments, the polymer-based nanoparticle comprises a multiblock copolymer, a diblock copolymer, a polymeric micelle or a hyperbranched macromolecule. In some embodiments, the polymer-based nanoparticle comprises a multiblock copolymer a diblock copolymer. In some embodiments, the polymer-based nanoparticle comprises a poly(lactic-co-glycolic acid) PLGA polymer.

[0011] In some embodiments of the nanoparticles of the disclosure, the nanoparticle comprises a targeting agent. In some embodiments, the targeting agent comprises a peptide ligand, a nucleotide ligand, a polysaccharide ligand, a fatty acid ligand, a lipid ligand, a small molecule ligand, an antibody, an antibody fragment, an antibody mimetic or an antibody mimetic fragment. In some embodiments, the polysaccharide ligand comprises hyaluronic acid. In some embodiments, the targeting agent binds to the surface of a cell of the cancer of the subject.

[0012] In some embodiments of the nanoparticles of the disclosure, the nanoparticle further comprises a chemotherapeutic agent. In some embodiments, the chemotherapeutic agent comprises a platinum based antineoplastic agent, a DNA alkylating agent, a DNA intercalating agent, or a topoisomerase inhibitor. In some embodiments, the platinum based antineoplastic agent is Cisplatin or Carboplatin. In some embodiments, the DNA alkylating agent is Cyclophosphamide. In some embodiments, the DNA intercalating agent is Doxorubicin. In some embodiments, the topoisomerase inhibitor is Etoposide or Topotecan.

[0013] The disclosure provides pharmaceutical compositions comprising the nanoparticles of the disclosure, and a pharmaceutically acceptable carrier, diluent or excipient. In some embodiments, the pharmaceutical composition further comprises a chemotherapeutic agent. In some embodiments the nanoparticle further comprises a chemotherapeutic agent. In some embodiments, the chemotherapeutic agent comprises a platinum based antineoplastic agent, a DNA alkylating agent, a DNA intercalating agent, or a topoisomerase inhibitor. In some embodiments, the platinum based antineoplastic agent is Cisplatin or Carboplatin. In some embodiments, the DNA alkylating agent is Cyclophosphamide. In some embodiments, the DNA intercalating agent is Doxorubicin. In some embodiments, the topoisomerase inhibitor is Etoposide or Topotecan. In some embodiments, the platinum based antineoplastic agent is Cisplatin or Carboplatin. In some embodiments, the DNA alkylating agent is Cyclophosphamide. In some embodiments, the DNA intercalating agent is Doxorubicin. In some embodiments, the topoisomerase inhibitor is Etoposide or Topotecan.

[0014] The disclosure provides kits comprising the nanoparticles or pharmaceutical compositions of the disclosure. In some embodiments, the kits further comprise instructions for administrating the nanoparticles or pharmaceutical compositions to a subject.

[0015] The disclosure provides methods of treating a cancer in a subject, comprising administering to the subject a therapeutically effective amount of the nanoparticles of the disclosure. In some embodiments, the methods comprise administering a chemotherapeutic agent to the subject.

[0016] The disclosure provides methods of treating a cancer in a subject, comprising administering to the subject a therapeutically effective amount of the pharmaceutical compositions of the disclosure to the subject. In some embodiments, the methods comprise administering a chemotherapeutic agent to the subject.

[0017] In some embodiments of the methods of the disclosure, the chemotherapeutic agent comprises a platinum based antineoplastic agent, a DNA alkylating agent, a DNA intercalating agent, or a topoisomerase inhibitor.

[0018] In some embodiments of the methods of the disclosure, the nanoparticles or the pharmaceutical composition is administered parenterally.

[0019] The disclosure provides methods of treating a cancer in a subject, comprising administering to the subject a therapeutically effective amount of a composition comprising a nanoparticle, the nanoparticle comprising a small interfering RNA (siRNA), wherein the siRNA comprises a sense region and anti-sense region complementary to the sense region that together form an RNA duplex, wherein the sense region comprises a sequence at least 70% identical to a glypican-2 (GPC2) mRNA sequence of SEQ ID NO: 1 or SEQ ID NO: 2.

[0020] In some embodiments of the methods of the disclosure, the sense region comprises a sequence that is identical to the GPC2 mRNA sequence. In some embodiments, the siRNA is capable of inducing RNAi-mediated degradation of a GPC2 mRNA in a cell of the cancer. In some embodiments, the sense region is encoded by a first single stranded RNA molecule and the anti-sense region is encoded by a second single stranded RNA molecule. In some embodiments, the first and second single stranded RNA molecules comprise 3′ overhangs. In some embodiments, the 3′ overhangs comprise thymidine-thymidine (dT-dT) or Uracil-Uracil (UU). In some embodiments, the RNA duplex is between 17 and 24 nucleotides in length. In some embodiments, the RNA duplex is 19 nucleotides in length. In some embodiments, the sense region comprises a sequence selected from the group listed in Table 1 or Table 2. In some embodiments, the siRNA comprises a sequence selected from the group consisting of SEQ ID NOs: 3-232. In some embodiments, the anti-sense region comprises a sequence selected from the group listed in Table 1 or Table 2. In some embodiments, the sense region comprises a sequence of CCUGCUUGGACCUCGAUAA (SEQ ID NO: 3), CUCAGUAGCCCAGCACUCU (SEQ ID NO: 4) or CUCCUUUCUGGUUCACACA (SEQ ID NO: 5). In some embodiments, the sense region comprises a sequence of CCUGCUUGGACCUCGAUAA (SEQ ID NO: 3) and the anti-sense region comprises a sequence of UUAUCGAGGUCCAAGCAGG (SEQ ID NO: 6). In some embodiments, the sense region comprises a sequence of CUCAGUAGCCCAGCACUCU (SEQ ID NO: 4) and the anti-sense region comprises a sequence of AGAGUGCUGGGCUACUGAG (SEQ ID NO: 7). In some embodiments, the sense region comprises a sequence of CUCCUUUCUGGUUCACACA (SEQ ID NO: 5) and the anti-sense region comprises a sequence of UGUGUGAACCAGAAAGGAG SEQ ID NO: 8).

[0021] In some embodiments of the methods of the disclosure, the siRNA comprises at least one modified nucleotide. In some embodiments, the at least one modified nucleotide increases stability of the RNA duplex. In some embodiments, the at least one modified nucleotide comprises a locked nucleic acid (LNA).

[0022] In some embodiments of the methods of the disclosure, the methods comprise administering a chemotherapeutic agent. In some embodiments, the chemotherapeutic agent comprises a platinum based antineoplastic agent, a DNA alkylating agent, a DNA intercalating agent, or a topoisomerase inhibitor. In some embodiments, the platinum based antineoplastic agent is Cisplatin or Carboplatin. In some embodiments, the DNA alkylating agent is Cyclophosphamide. In some embodiments, the DNA intercalating agent is Doxorubicin. In some embodiments, the topoisomerase inhibitor is Etoposide or Topotecan. In some embodiments, the platinum based antineoplastic agent is Cisplatin or Carboplatin. In some embodiments, the DNA alkylating agent is Cyclophosphamide. In some embodiments, the DNA intercalating agent is Doxorubicin. In some embodiments, the topoisomerase inhibitor is Etoposide or Topotecan.

[0023] In some embodiments of the methods of the disclosure, the pharmaceutical composition is administered at the same time as the chemotherapeutic agent. In some embodiments, the chemotherapeutic agent is formulated in the composition comprising the nanoparticle. In some embodiments, the chemotherapeutic and the siRNA are formulated in the same nanoparticle. In some embodiments, the pharmaceutical composition is administered in temporal proximity to the chemotherapeutic agent.

[0024] In some embodiments of the methods of the disclosure, the pharmaceutical composition is administered parenterally. In some embodiments, the parenteral administration is intravenous, subcutaneous, intraperitoneal or intramuscular. In some embodiments, the parenteral administration comprises an intravenous injection or infusion. In some embodiments, the methods further comprise a standard of care for the cancer. In some embodiments of the methods of the disclosure, the cancer expresses GPC2 on a surface of a cell of the cancer.

[0025] In some embodiments, the cancer is selected from the group consisting of astrocytoma, breast cancer, colorectal cancer, Ewing's sarcoma, gastric cancer, leiomyosarcoma, liver cancer, lung cancer, mesothelioma, ovarian cancer, pancreatic cancer, renal cancer, rhabdomyosarcoma and neuroblastoma. In some embodiments, the cancer is neuroblastoma.

[0026] In some embodiments of the methods of the disclosure, administration of the nanoparticle or the pharmaceutical composition decreases viability of a cell of the cancer. In some embodiments, administration of the composition increases apoptosis of cancer cells. In some embodiments, administration of the composition increases sensitivity of the cancer to the chemotherapeutic agent. In some embodiments, administration of the composition increases the effectiveness of the chemotherapeutic agent. In some embodiments, administration of the composition decreases the IC50 of the chemotherapeutic agent. In some embodiments, administration of the composition reduces a side effect of the chemotherapeutic agent. In some embodiments, administration of the composition reduces the therapeutically effective dose of a chemotherapeutic agent. In some embodiments, administration of the composition reduces a sign or a symptom of the cancer.

### BRIEF DESCRIPTION OF THE DRAWINGS

[0027] FIG. 1 is a graph showing percentages of cells stained for GPC2 in neuroblastoma (NB) tumor samples and normal tissues (NORMAL). Increased GPC2 protein expression is observed in neuroblastoma tumors when compared to normal tissue.

[0028] FIG. 2A is a plot showing knockdown of GPC2 mRNA using siRNA sequences 1-5 from Table 7 in the Ewing's Sarcoma TC-32 cell line. Expression is compared to a scrambled control siRNA.

[0029] FIG. 2B is a plot showing that GPC2 mRNA knockdown in the Ewing's Sarcoma TC-32 cell line was sustained for at least 96 hours following transfection with siRNAs sequence 3 or 5 from Table 7. Expression is compared to a scrambled control siRNA.

[0030] FIG. 3A is a plot showing relative GPC2 mRNA expression following siRNA mediated knockdown of GPC2 in the CHP212, SKNAS and SHSY5Y neuroblastoma cell lines using GPC2 siRNA sequences 3, 5, 12, 13, 14, and 15 from Table 7. Expression is compared to a scrambled control siRNA.

[0031] FIG. 3B is a plot showing percent viability of cells following siRNA mediated knockdown of GPC2 in the CHP212, SKNAS and SHSY5Y neuroblastoma cell lines using GPC2 siRNA sequences 3, 5, 12, 13, 14, and 15 from Table 7. Viability is compared to a scrambled control siRNA.

[0032] FIG. 4A is a plot showing relative GPC2 mRNA expression following GPC2 mRNA knockdown in the CHP212 neuroblastoma cell line following transfection with GPC2 siRNA sequences 3, 5, 6, 7, 8, 9, 10 and 11 from Table 7 and a scrambled control siRNA.

[0033] FIG. 4B is a plot cell viability following GPC2 mRNA knockdown in the CHP212 neuroblastoma cell line following transfection with GPC2 siRNAs 3, 5, 6, 7, 8, 9, 10 and 11 from Table 7 and a scrambled control siRNA.

[0034] FIG. 5A is a plot showing relative GPC2 mRNA expression in CHP212 neuroblastoma cells following transfection with GPC2 siRNA sequences 5 and 7 from Table 7 and a scrambled control siRNA. Reduced GPC2 mRNA expression seen with siRNA sequences 5 and 7 was sustained for 72 hours.

[0035] FIG. 5B is a plot showing relative GPC2 mRNA expression in SH-SY5Y neuroblastoma cells following transfection with GPC2 siRNA sequences 5 and 7 from Table 7 and a scrambled control siRNA. Reduced GPC2 mRNA expression seen with siRNA sequences 5 and 7 was sustained for 72 hours.

[0036] FIG. 5C is a plot showing relative GPC2 mRNA expression in CHLA90 neuroblastoma cells following transfection with GPC2 siRNA sequences 5 and 7 from Table 7 and a scrambled control siRNA. Reduced GPC2 mRNA expression seen with siRNA sequences 5 and 7 was sustained for 72 hours.

[0037] FIG. 5D is a plot showing GPC2 protein expression levels in neuroblastoma CHP212 cells following transfection with GPC2 siRNA sequences 5 and 7 from Table 7 and a scrambled control siRNA. Protein expression was measured via flow cytometry of cells fixed and immunostained with a GPC2 antibody, and is reported as Mean Fluorescence (FL1) Intensity. Reduced GPC2 protein expression with siRNA sequences 5 and 7 can be seen at 48 and 72 hours.

[0038] FIG. 5E is a plot showing GPC2 protein expression levels in SH-SY5Y neuroblastoma cells following transfection with GPC2 siRNA sequences 5 and 7 from Table 7 and a scrambled control siRNA. Protein expression was measured via flow cytometry of cells fixed and immunostained with a GPC2 antibody, and is reported as Mean Fluorescence (FL1) Intensity. Reduced GPC2 protein expression with siRNA sequences 5 and 7 can be seen at 48 and 72 hours.

[0039] FIG. 5F is a plot showing GPC2 protein expression levels in CHLA90 neuroblastoma cells following transfection with GPC2 siRNA sequences 5 and 7 from Table 7 and a scrambled control siRNA. Protein expression was measured via flow cytometry of cells fixed and immunostained with a GPC2 antibody, and is reported as Mean Fluorescence (FL1) Intensity. Reduced GPC2 protein expression with siRNA sequences 5 and 7 can be seen at 72 hours.

[0040] FIG. 6 is as series of 12 images showing the effect of siRNA-mediated reduction in GPC2 expression on tumor spheroid formation. Columns, from left to right, show tumor spheroids from CHP212, SKNAS, SKNBE2 and CHLA90 neuroblastoma cells. At bottom, the percent knockdown efficiencies of GPC2 mRNA with the siRNA of sequence 5 from Table 1 are indicated. Top row: no treatment; middle row: cells transfected with a scrambled control siRNA; bottom row: cells were transfected with GPC2 siRNA of sequence 5 from Table 7.

[0041] FIG. 7A is a series of four plots showing the relative levels of GPC2 mRNA following siRNA mediated GPC2 mRNA knockdown in established spheroid cultures. From left to right, spheroids from CHP212, SKNAS and SK—N-BE2 and CHLA90 neuroblastoma cells were transfected with either a scrambled siRNA control (siControl), or siRNAs of sequence 5 or sequence 7 from Table 7.

[0042] FIG. 7B is a series of four plots showing the effect on cell viability of siRNA mediated GPC2 mRNA knockdown in established spheroid cultures. From left to right, spheroids from CHP212, SKNAS and SK—N-BE2 and CHLA90 neuroblastoma cells were transfected with either a scrambled siRNA control (siControl), or siRNAs of sequence 5 or sequence 7 from Table 7.

### DETAILED DESCRIPTION

[0043] Glypican-2 (Glypican 2, GPC2, or GPC-2) is a cell surface protein that belongs to a family of six proteoglycans. These proteins are Glycosylphosphatidylinositol (GPI) anchored to the cell membrane, and play diverse roles in signaling and cancer cell growth. Although GPC2 was initially thought to be solely expressed during nervous system development, GPC2 is also expressed in neuroblastoma and other cancers. Further, GPC2 is regulated by the MYC oncogene via direct transcriptional activation. Treating GPC2 positive neuroblastoma cells with a GPC2 antibody conjugated to pyrrolobenzodiazepine, a cytotoxic DNA crosslinking agent, reduced cell proliferation and increased apoptosis in neuroblastoma cell lines and increased survival in neuroblast patient derived xenograft (PDX) mouse models. Higher levels of GPC2 expression can result in enhanced tumor cell growth, while decreasing GPC2 expression can decrease neuroblastoma cell viability.

[0044] Without wishing to be bound by theory, the inventors have found that use of a small interfering RNA (siRNA) can decrease GPC2 messenger RNA expression, in turn leading to a decrease in the degree of GPC-2 protein expression, and inhibiting proliferation of cancer cells expressing GPC2. Affecting GPC2 protein expression leads to a decrease in GPC2 function which results in an anti-cancer activity, for example by increasing apoptosis.

[0045] The inventors have shown that knocking down GPC2 mRNA resulted in a decrease in cell viability in multiple cancer cell lines. In addition, when combined with a chemotherapeutic agent, knocking down GPC2 mRNA resulted in a decrease in the IC₅₀ of the chemotherapeutic agent in treating cancer. Thus, knocking down GPC2 mRNA can enhance the activity of chemotherapeutic or therapeutic agents. When chemotherapeutic agents are administered in combination with GPC2 siRNAs, this combination can (a) reduce the therapeutically effective dose of the chemotherapeutic agent, (b) reduce side effects of the chemotherapeutic agent, and (c) increase the effectiveness of the chemotherapeutic agent.

[0046] In some embodiments, the siRNA targeting GPC2 is encapsulated in a nanoparticle that contains a tumor targeting agent or moiety. Exemplary tumor targeting agents include hyaluronic acid (HA). Tumor targeting agents on the surface of the nanoparticle can specifically target the nanoparticle to tumor cells that express a binding partner or receptor for the tumor targeting agent. For example, in the case of HA, HA on the nanoparticle can bind to CD44 molecules (CD44) on surface of cancer cells expressing CD44. Encapsulating GPC2 targeting siRNAs in a nanoparticle comprising a tumor targeting agent such as HA can thus increase the delivery of the siRNA to tumor cells.

[0047] GPC2 targeting siRNAs, and nanoparticles comprising same siRNAs, have utility for the treatment of any cancer that expresses GPC2. For example, neuroblastomas frequently express GPC2. GPC2 targeting siRNAs, and nanoparticles comprising siRNAs targeting GPC2, can be thus be used to treat neuroblastomas.

[0048] Accordingly, the disclosure provides nanoparticles comprising siRNAs, wherein the siRNA comprises a sense region and anti-sense region complementary to the sense region that together form an RNA duplex, and wherein the sense region comprises a sequence at least 70% to 100% identical to a glypican-2 (GPC2) mRNA sequence.

[0049] The disclosure provides pharmaceutical compositions comprising the nanoparticles comprising siRNAs targeting a GPC2 mRNA sequence described herein, and a pharmaceutically acceptable carrier, diluent or excipient.

[0050] The disclosure provides methods of treating a cancer in a subject, comprising administering to the subject a therapeutically effective amount of a composition comprising nanoparticles comprising siRNAs targeting a GPC2 mRNA described herein. In some embodiments, the methods further comprise combining the nanoparticles with a chemotherapeutic agent.

### Definitions

[0051] “RNAi” or “RNA interference” refers to the process of sequence-specific post-transcriptional gene silencing, mediated by double-stranded RNA (dsRNA). Duplex RNA siRNA (small interfering RNA), miRNA (micro RNA), shRNA (short hairpin RNA), ddRNA (DNA-directed RNA), piRNA (Piwi-interacting RNA), or rasiRNA (repeat associated siRNA) and modified forms thereof are all capable of mediating RNA interference. These dsRNA molecules may be commercially available or may be designed and prepared based on known sequence information, etc. The anti-sense strand of these molecules can include RNA, DNA, PNA, or a combination thereof. These DNA/RNA chimera polynucleotide includes, but is not limited to, a double-strand polynucleotide composed of DNA and RNA that inhibits the expression of a target gene. These dsRNA molecules can also include one or more modified nucleotides, as described herein, which can be incorporated on either strand.

[0052] In the RNAi gene silencing or knockdown process, dsRNA comprising a first (anti-sense) strand that is complementary to a portion of a target gene and a second (sense) strand that is fully or partially complementary to the first anti-sense strand is introduced into an organism. After introduction into the organism, the target gene-specific dsRNA is processed into relatively small fragments (siRNAs) and can subsequently become distributed throughout the organism, decrease messenger RNA of target gene, leading to a phenotype that may come to closely resemble the phenotype arising from a complete or partial deletion of the target gene.

[0053] Certain dsRNAs in cells can undergo the action of Dicer enzyme, a ribonuclease III enzyme. Dicer can process the dsRNA into shorter pieces of dsRNA, i.e. siRNAs. RNAi also involves an endonuclease complex known as the RNA induced silencing complex (RISC). Following cleavage by Dicer, siRNAs enter the RISC complex and direct cleavage of a single stranded RNA target having a sequence complementary to the anti-sense strand of the siRNA duplex. The other strand of the siRNA is the passenger strand. Cleavage of the target RNA takes place in the middle of the region complementary to the anti-sense strand of the siRNA duplex. siRNAs can thus down regulate or knock down gene expression by mediating RNA interference in a sequence-specific manner.

[0054] As used herein, “target gene” or “target sequence” refers to a gene or gene sequence whose corresponding RNA is targeted for degradation through the RNAi pathway using dsRNAs or siRNAs as described herein. To target a gene, for example using an siRNA, the siRNA comprises an anti-sense region complementary to, or substantially complementary to, at least a portion of the target gene or sequence, and sense strand complementary to the anti-sense strand. Once introduced into a cell, the siRNA directs the RISC complex to cleave an RNA comprising a target sequence, thereby degrading the RNA.

[0055] As used herein, “nucleic acid,” “nucleotide sequence,” and “polynucleotide” are used interchangeably and encompass both RNA and DNA, including cDNA, genomic DNA, mRNA, synthetic (e.g., chemically synthesized) DNA or RNA and chimeras of RNA and DNA. The term polynucleotide, nucleotide sequence, or nucleic acid refers to a chain of nucleotides without regard to length of the chain. The nucleic acid can be double-stranded or single-stranded. Where single-stranded, the nucleic acid can be a sense strand or an anti-sense strand. The nucleic acid can be synthesized using oligonucleotide analogs or derivatives (e.g., inosine or phosphorothioate nucleotides). Such oligonucleotides can be used, for example, to prepare nucleic acids that have altered base-pairing abilities or increased resistance to nucleases. The present invention further provides a nucleic acid that is the complement (which can be either a full complement or a partial complement) of a nucleic acid, nucleotide sequence, or polynucleotide of this invention. When dsRNA is produced synthetically, less common bases, such as inosine, 5-methylcytosine, 6-methyladenine, hypoxanthine and others can also be used for anti-sense, dsRNA, and ribozyme pairing. Other modifications, such as modification to the phosphodiester backbone, or the 2′-hydroxy or 2′O-methyl in the ribose sugar group of the RNA can also be made.

[0056] The term “isolated” can refer to a nucleic acid, nucleotide sequence or polypeptide that is substantially free of cellular material, viral material, and/or culture medium (when produced by recombinant DNA techniques), or chemical precursors or other chemicals (when chemically synthesized). Moreover, an “isolated fragment” is a fragment of a nucleic acid, nucleotide sequence or polypeptide that is not naturally occurring as a fragment and would not be found in the natural state. “Isolated” does not mean that the preparation is technically pure (homogeneous), but it is sufficiently pure to provide the polypeptide or nucleic acid in a form in which it can be used for the intended purpose.

[0057] The term “fragment,” as applied to a polynucleotide, will be understood to mean a nucleotide sequence of reduced length relative to a reference nucleic acid or nucleotide sequence and comprising, consisting essentially of, and/or consisting of a nucleotide sequence of contiguous nucleotides identical or almost identical (e.g., 60%, 70%, 80%, 90%, 92%, 95%, 98% or 99% identical) to the reference nucleic acid or nucleotide sequence. Such a nucleic acid fragment according to the invention may be, where appropriate, included in a larger polynucleotide of which it is a constituent. In some embodiments, such fragments can comprise, consist essentially of, and/or consist of oligonucleotides having a length of at least about 8, 10, 12, 15, 20, 25, 30, 35, 40, 45, 50, 75, 100, 150, 200, or more consecutive nucleotides of a nucleic acid or nucleotide sequence according to the invention.

[0058] As used herein, “complementary” polynucleotides are those that are capable of base pairing according to the standard Watson-Crick complementarity rules. Specifically, purines will base pair with pyrimidines to form a combination of guanine paired with cytosine (G:C) and adenine paired with either thymine (A:T) in the case of DNA, or adenine paired with uracil (A:U) in the case of RNA. For example, the sequence “A-G-T” binds to the complementary sequence “T-C-A.” It is understood that two polynucleotides may hybridize to each other even if they are not completely complementary to each other, provided that each has at least one region that is substantially complementary to the other.

[0059] As used herein, the terms “substantially complementary” or “partially complementary” mean that two nucleic acid sequences are complementary at least at about 50%, 60%, 70%, 80% or 90% of their nucleotides.

[0060] In some embodiments, the two nucleic acid sequences can be complementary at least at 85%, 90%, 95%, 96%, 97%, 98%, 99% or more of their nucleotides. In some embodiments, the two nucleic acid sequences can be between 60% to 100% complementary, between 70% to 100% complementary, between 80% and 100% complementary, between 90% and 100% complementary, between 60% to 90% complementary, between 60% to 80% complementary, between 60% and 70% complementary, between 70% and 90% complementary, between 70% and 80% complementary, between 80% and 100% complementary, or between 80% and 90% complementary.

[0061] The terms “substantially complementary” and “partially complementary” can also mean that two nucleic acid sequences can hybridize under high stringency conditions, and such conditions are well known in the art.

[0062] As used herein, the term “identity” means that sequences are compared with one another as follows. In order to determine the percentage identity of two nucleic acid sequences, the sequences can first be aligned with respect to one another in order subsequently to make a comparison of these sequences possible. For this e.g. gaps can be inserted into the sequence of the first nucleic acid sequence and the nucleotides can be compared with the corresponding position of the second nucleic acid sequence. If a position in the first nucleic acid sequence is occupied by the same nucleotide as is the case at a position in the second sequence, the two sequences are identical at this position. The percentage identity between two sequences is a function of the number of identical positions divided by the number of all the positions compared in the sequences investigated.

[0063] A “percent identity” for aligned segments of a test sequence and a reference sequence is the percent of identical components which are shared by the two aligned sequences divided by the total number of components in reference sequence segment, i.e., the entire reference sequence or a smaller defined part of the reference sequence.

[0064] The percentage identity of two sequences can be determined with the aid of a mathematical algorithm. A preferred, but not limiting, example of a mathematical algorithm which can be used for comparison of two sequences is the algorithm of Karlin et al. (1993), PNAS USA, 90:5873-5877. Such an algorithm is integrated in the NBLAST program, with which sequences which have a desired identity to the sequences of the present invention can be identified. In order to obtain a gapped alignment, as described here, the “Gapped BLAST” program can be used, as is described in Altschul et al. (1997), Nucleic Acids Res, 25:3389-3402. If BLAST and Gapped BLAST programs are used, the preset parameters of the particular program (e.g. NBLAST) can be used. The sequences can be aligned further using version 9 of GAP (global alignment program) of the “Genetic Computing Group” using the preset (BLOSUM62) matrix (values −4 to +11) with a gap open penalty of −12 (for the first zero of a gap) and a gap extension penalty of −4 (for each additional successive zero in the gap). After the alignment, the percentage identity is calculated by expressing the number of agreements as a percentage content of the nucleic acids in the sequence claimed. The methods described for determination of the percentage identity of two nucleic acid sequences can also be used correspondingly, if necessary, on the coded amino acid sequences.

[0065] Useful methods for determining sequence identity are also disclosed in Guide to Huge Computers (Martin J. Bishop, ed., Academic Press, San Diego (1994)), and Carillo, H., and Lipton, D., (Applied Math 48:1073(1988)). More particularly, preferred computer programs for determining sequence identity include but are not limited to the Basic Local Alignment Search Tool (BLAST) programs which are publicly available from National Center Biotechnology Information (NCBI) at the National Library of Medicine, National Institute of Health, Bethesda, Md. 20894; see BLAST Manual, Altschul et al., NCBI, NLM, NIH; (Altschul et al., J. Mol. Biol. 215:403-410 (1990)); version 2.0 or higher of BLAST programs allows the introduction of gaps (deletions and insertions) into alignments; for peptide sequence BLASTX can be used to determine sequence identity; and, for polynucleotide sequence BLASTN can be used to determine sequence identity. Percent identity can be 70% identity or greater, e.g., at least 70% identity, at least 75% identity, at least 80% identity, at least 85% identity, at least 90% identity, at least 95% identity, at least 98% identity, at least 99% identity or 100% identity.

[0066] As used herein, “heterologous” refers to a nucleic acid sequence that either originates from another species or is from the same species or organism but is modified from either its original form or the form primarily expressed in the cell. Thus, a nucleotide sequence derived from an organism or species different from that of the cell into which the nucleotide sequence is introduced, is heterologous with respect to that cell and the cell's descendants. In addition, a heterologous nucleotide sequence includes a nucleotide sequence derived from and inserted into the same natural, original cell type, but which is present in a non-natural state, e.g., a different copy number, and/or under the control of different regulatory sequences than that found in nature.

### Double Stranded RNAs Targeting Glypican-2

[0067] The disclosure provides double stranded RNAs (dsRNAs) which target a glypican-2 (GPC2) mRNA sequence for degradation. The double stranded RNA molecule of the invention may be in the form of any type of RNA interference molecule known in the art. In some embodiments, the double stranded RNA molecule is a small interfering RNA (siRNA). In other embodiments, the double stranded RNA molecule is a short hairpin RNA (shRNA) molecule. In other embodiments, the double stranded RNA molecule is a Dicer substrate that is processed in a cell to produce an siRNA. In other embodiments the double stranded RNA molecule is part of a microRNA precursor molecule.

[0068] In some embodiments, the dsRNA is a small interfering RNA (siRNA) which targets a glypican-2 (GPC2) mRNA sequence for degradation. In some embodiments, the siRNA targeting GPC2 is packaged in a nanoparticle.

[0069] An exemplary Glypican-2 sequence is described in NM_152742.3, the contents of which are incorporated by reference in their entirety herein. In some embodiments, a human GPC2 mRNA comprises a sequence of:

| (SEQ ID NO: 1) | |
|---|---|
| 1 | GCTCCCATTG TCTCGGCAGA TGCCGCCTGG TCCAGCTATC GTGCTCGGTA TTCAGTTTTC |
| ` | |
| 61 | CGGAGCAGCG CTCTTTCTCT GGCCCGCGGA GCGGTCCCGC GGCCGAGTAC CGGATTCCCG |
| 121 | AGTTTGGGAG GCTCTGCTTT CCTCCTTAGG ACCCACTTTG CCGTCCTGGG GTGGCTGCAG |
| 181 | TTATGTCCGC GCTGCGACCT CTCCTGCTTC TGCTGCTGCC TCTGTGTCCC GGTCCTGGTC |
| 241 | CCGGACCCGG GAGCGAGGCA AAGGTCACCC GGAGTTGTGC AGAGACCCGG CAGGTGCTGG |
| 301 | GGGCCCGGGG ATATAGCTTA AACCTAATCC CTCCCGCCCT GATCTCAGGT GAGCACCTCC |
| 361 | GGGTCTGTCC CCAGGAGTAC ACCTGCTGTT CCAGTGAGAC AGAGCAGAGG CTGATCAGGG |
| 421 | AGACTGAGGC CACCTTCCGA GGCCTGGTGG AGGACAGCGG CTCCTTTCTG GTTCACACAC |
| 481 | TGGCTGCCAG GCACAGAAAA TTTGATGAGT TTTTTCTGGA GATGCTCTCA GTAGCCCAGC |
| 541 | ACTCTCTGAC CCAGCTCTTC TCCCACTCCT ACGGCCGCCT GTATGCCCAG CACGCCCTCA |
| 601 | TATTCAATGG CCTGTTCTCT CGGCTGCGAG ACTTCTATGG GGAATCTGGT GAGGGGTTGG |
| 661 | ATGACACCCT GGCGGATTTC TGGGCACAGC TCCTGGAGAG AGTGTTCCCG CTGCTGCACC |
| 721 | CACAGTACAG CTTCCCCCCT GACTACCTGC TCTGCCTCTC ACGCTTGGCC TCATCTACCG |
| 781 | ATGGCTCTCT GCAGCCCTTT GGGGACTCAC CCCGCCGCCT CCGCCTGCAG ATAACCCGGA |
| 841 | CCCTGGTGGC TGCCCGAGCC TTTGTGCAGG GCCTGGAGAC TGGAAGAAAT GTGGTCAGCG |
| 901 | AAGCGCTTAA GGTGCCGGTG TCTGAAGGCT GCAGCCAGGC TCTGATGCGT CTCATCGGCT |
| 961 | GTCCCCTGTG CCGGGGGGTC CCCTCACTTA TGCCCTGCCA GGGCTTCTGC CTCAACGTGG |
| 1021 | TTCGTGGCTG TCTCAGCAGC AGGGGACTGG AGCCTGACTG GGGCAACTAT CTGGATGGTC |
| 1081 | TCCTGATCCT GGCTGATAAG CTCCAGGGCC CCTTTTCCTT TGAGCTGACG GCCGAGTCCA |
| 1141 | TTGGGGTGAA GATCTCGGAG GGTTTGATGT ACCTGCAGGA AAACAGTGCG AAGGTGTCCG |
| 1201 | CCCAGGTGTT TCAGGAGTGC GGCCCCCCCG ACCCGGTGCC TGCCCGCAAC CGTCGAGCCC |
| 1261 | CGCCGCCCCG GGAAGAGGCG GGCCGGCTGT GGTCGATGGT GACCGAGGAG GAGCGGCCCA |
| 1321 | CGACGGCCGC AGGCACCAAC CTGCACCGGC TGGTGTGGGA GCTCCGCGAG CGTCTGGCCC |
| 1381 | GGATGCGGGG CTTCTGGGCC CGGCTGTCCC TGACGGTGTG CGGAGACTCT CGCATGGCAG |
| 1441 | CGGACGCCTC GCTGGAGGCG GCGCCCTGCT GGACCGGAGC CGGGCGGGGC CGGTACTTGC |
| 1501 | CGCCAGTGGT CGGGGGCTCC CCGGCCGAGC AGGTCAACAA CCCCGAGCTC AAGGTGGACG |
| 1561 | CCTCGGGCCC CGATGTCCCG ACACGGCGGC GTCGGCTACA GCTCCGGGCG GCCACGGCCA |
| 1621 | GAATGAAAAC GGCCGCACTG GGACACGACC TGGACGGGCA GGACGCGGAT GAGGATGCCA |
| 1681 | GCGGCTCTGG AGGGGGACAG CAGTATGCAG ATGACTGGAT GGCTGGGGCT GTGGCTCCCC |
| 1741 | CAGCCCGGCC TCCTCGGCCT CCATACCCTC CTAGAAGGGA TGGTTCTGGG GGCAAAGGAG |
| 1801 | GAGGTGGCAG TGCCCGCTAC AACCAGGGCC GGAGCAGGAG TGGGGGGGCA TCTATTGGTT |
| 1861 | TTCACACCCA AACCATCCTC ATTCTCTCCC TCTCAGCCCT GGCCCTGCTT GGACCTCGAT |
| 1921 | AACGGGGGAG GGGTGCCCTA GCATCAGAAG GGTTCATGGC CCTTTCCCCT CCTCCCCCCT |
| 1981 | CAGCTGGGCC TGGGGAGGAG TCGAAGGGGG CTGCAGAGAG GGTAGAGAAG GGACTTTGCA |
| 2041 | GGTGAATGGC TGGGGCCCCA AATCCAGGAG ATTTTCATCA GAGGTGGGTG GGTGTTCACA |
| 2101 | ATATTTATTT TTTCATTTGG TAATGGGAGG GGGGCCTGGG GGTATTTATT TAGGAGGGAG |
| 2161 | TGTGGTTTCC TTAGAAGGTA TAGTCTCTAG CCCTCTAAGG CTGGGGCTGG TGATCAGCCC |
| 2221 | CAACAGAGAA AATGAGGAGT TTAGAGTTGC AGCTGGGGAA GGGGTTTGAA GGAAGTTGGA |
| 2281 | AGTGGGGAGG GGTGGGGGCA TCTGGTCTCA GAAATGGACC AGCTGGATGC AGGGCAGGGG |
| 2341 | ACTGAGGGTG CTTGAGTAGG ATGTGAGACT TCATGGGCCT GGGTTCTGTT GAGTTTTTTC |
| 2401 | AGTATCAATT TCTTAAACCA AATTTTAAAA AAAACAAGGT GGGGGGGTGC TCATCTCGTG |
| 2461 | ACCTCTGCCA CCCACATCCT TCACAAACTC CATGTTTCAG TGTTTGAGTC CATGTTTATT |
| 2521 | CTGCAAATAA ATGGTAATGT ATTGGA. |

[0070] A further example of a Glypican-2 sequence is described in NM_152742.2, the contents of which are incorporated by reference in their entirety herein. In some embodiments, a human GPC2 mRNA comprises a sequence of:

| (SEQ ID NO: 2) | |
|---|---|
| 1 | ATTGGCGGGG CCCCGCCTCG GGCCCCGCCC CCTGTCCGGC TCCCCGCTCC CATTGTCTCG |
| 61 | GCAGATGCCG CCTGGTCCAG CTATCGTGCT CGGTATTCAG TTTTCCGGAG CAGCGCTCTT |
| 121 | TCTCTGGCCC GCGGAGCGGT CCCGCGGCCG AGTACCGGAT TCCCGAGTTT GGGAGGCTCT |
| 181 | GCTTTCCTCC TTAGGACCCA CTTTGCCGTC CTGGGGTGGC TGCAGTTATG TCCGCGCTGC |
| 241 | GACCTCTCCT GCTTCTGCTG CTGCCTCTGT GTCCCGGTCC TGGTCCCGGA CCCGGGAGCG |
| 301 | AGGCAAAGGT CACCCGGAGT TGTGCAGAGA CCCGGCAGGT GCTGGGGGCC CGGGGATATA |
| 361 | GCTTAAACCT AATCCCTCCC GCCCTGATCT CAGGTGAGCA CCTCCGGGTC TGTCCCCAGG |
| 421 | AGTACACCTG CTGTTCCAGT GAGACAGAGC AGAGGCTGAT CAGGGAGACT GAGGCCACCT |
| 481 | TCCGAGGCCT GGTGGAGGAC AGCGGCTCCT TTCTGGTTCA CACACTGGCT GCCAGGCACA |
| 541 | GAAAATTTGA TGAGTTTTTT CTGGAGATGC TCTCAGTAGC CCAGCACTCT CTGACCCAGC |
| 601 | TCTTCTCCCA CTCCTACGGC CGCCTGTATG CCCAGCACGC CCTCATATTC AATGGCCTGT |
| 661 | TCTCTCGGCT GCGAGACTTC TATGGGGAAT CTGGTGAGGG GTTGGATGAC ACCCTGGCGG |
| 721 | ATTTCTGGGC ACAGCTCCTG GAGAGAGTGT TCCCGCTGCT GCACCCACAG TACAGCTTCC |
| 781 | CCCCTGACTA CCTGCTCTGC CTCTCACGCT TGGCCTCATC TACCGATGGC TCTCTGCAGC |
| 841 | CCTTTGGGGA CTCACCCCGC CGCCTCCGCC TGCAGATAAC CCGGACCCTG GTGGCTGCCC |
| 901 | GAGCCTTTGT GCAGGGCCTG GAGACTGGAA GAAATGTGGT CAGCGAAGCG CTTAAGGTGC |
| 961 | CGGTGTCTGA AGGCTGCAGC CAGGCTCTGA TGCGTCTCAT CGGCTGTCCC CTGTGCCGGG |
| 1021 | GGGTCCCCTC ACTTATGCCC TGCCAGGGCT TCTGCCTCAA CGTGGTTCGT GGCTGTCTCA |
| 1081 | GCAGCAGGGG ACTGGAGCCT GACTGGGGCA ACTATCTGGA TGGTCTCCTG ATCCTGGCTG |
| 1141 | ATAAGCTCCA GGGCCCCTTT TCCTTTGAGC TGACGGCCGA GTCCATTGGG GTGAAGATCT |
| 1201 | CGGAGGGTTT GATGTACCTG CAGGAAAACA GTGCGAAGGT GTCCGCCCAG GTGTTTCAGG |
| 1261 | AGTGCGGCCC CCCCGACCCG GTGCCTGCCC GCAACCGTCG AGCCCCGCCG CCCCGGGAAG |
| 1321 | AGGCGGGCCG GCTGTGGTCG ATGGTGACCG AGGAGGAGCG GCCCACGACG GCCGCAGGCA |
| 1381 | CCAACCTGCA CCGGCTGGTG TGGGAGCTCC GCGAGCGTCT GGCCCGGATG CGGGGCTTCT |
| 1441 | GGGCCCGGCT GTCCCTGACG GTGTGCGGAG ACTCTCGCAT GGCAGCGGAC GCCTCGCTGG |
| 1501 | AGGCGGCGCC CTGCTGGACC GGAGCCGGGC GGGGCCGGTA CTTGCCGCCA GTGGTCGGGG |
| 1561 | GCTCCCCGGC CGAGCAGGTC AACAACCCCG AGCTCAAGGT GGACGCCTCG GGCCCCGATG |
| 1621 | TCCCGACACG GCGGCGTCGG CTACAGCTCC GGGCGGCCAC GGCCAGAATG AAAACGGCCG |
| 1681 | CACTGGGACA CGACCTGGAC GGGCAGGACG CGGATGAGGA TGCCAGCGGC TCTGGAGGGG |
| 1741 | GACAGCAGTA TGCAGATGAC TGGATGGCTG GGGCTGTGGC TCCCCCAGCC CGGCCTCCTC |
| 1801 | GGCCTCCATA CCCTCCTAGA AGGGATGGTT CTGGGGGCAA AGGAGGAGGT GGCAGTGCCC |
| 1861 | GCTACAACCA GGGCCGGAGC AGGAGTGGGG GGGCATCTAT TGGTTTTCAC ACCCAAACCA |
| 1921 | TCCTCATTCT CTCCCTCTCA GCCCTGGCCC TGCTTGGACC TCGATAACGG GGGAGGGGTG |
| 1981 | CCCTAGCATC AGAAGGGTTC ATGGCCCTTT CCCCTCCTCC CCCCTCAGCT GGGCCTGGGG |
| 2041 | AGGAGTCGAA GGGGGCTGCA GAGAGGGTAG AGAAGGGACT TTGCAGGTGA ATGGCTGGGG |
| 2101 | CCCCAAATCC AGGAGATTTT CATCAGAGGT GGGTGGGTGT TCACAATATT TATTTTTTCA |
| 2161 | TTTGGTAATG GGAGGGGGGC CTGGGGGTAT TTATTTAGGA GGGAGTGTGG TTTCCTTAGA |
| 2221 | AGGTATAGTC TCTAGCCCTC TAAGGCTGGG GCTGGTGATC AGCCCCAACA GAGAAAATGA |
| 2281 | GGAGTTTAGA GTTGCAGCTG GGGAAGGGGT TTGAAGGAAG TTGGAAGTGG GGAGGGGTGG |
| 2341 | GGGCATCTGG TCTCAGAAAT GGACCAGCTG GATGCAGGGC AGGGGACTGA GGGTGCTTGA |
| 2401 | GTAGGATGTG AGACTTCATG GGCCTGGGTT CTGTTGAGTT TTTTCAGTAT CAATTTCTTA |
| 2461 | AACCAAATTT TAAAAAAAAC AAGGTGGGGG GGTGCTCATC TCGTGACCTC TGCCACCCAC |
| 2521 | ATCCTTCACA AACTCCATGT TTCAGTGTTT GAGTCCATGT TTATTCTGCA AATAAATGGT |
| 2581 | AATGTATTGG AAAAAAAAAA AAAAAAAAAA AAAAA. |

[0071] siRNAs targeting GPC2 for degradation can comprise a sense strand at least 70% identical to any fragment of a GPC2 mRNA, for example the GPC2 mRNA of SEQ ID NO: 1 or SEQ ID NO: 2. In some embodiments, the sense strand comprises or consists essentially of a sequence at least 70%, at least 80%, at least 90%, at least 95% or is 100% identical to any fragment of SEQ ID NO: 1 or SEQ ID NO: 2. siRNAs targeting GPC2 for degradation can comprise an anti-sense strand at least 70% identical to a sequence complementary to any fragment of a GPC2 mRNA, for example the GPC2 mRNA of SEQ ID NO: 1 or SEQ ID NO: 2. In some embodiments, the anti-sense strand comprises or consists essentially of a sequence at least 70%, at least 80%, at least 90%, at least 95% or is 100% identical to a sequence complementary to any fragment of SEQ ID NO: 1 or SEQ ID NO: 2. In some embodiments, the sense region and anti-sense regions are complementary, and basepair to form an RNA duplex structure. The fragment of the GPC2 mRNA that has percent identity to the sense region of the siRNA, and which is complementary to the anti-sense region of the siRNA, can be protein coding sequence of the mRNA, an untranslated region (UTR) of the mRNA (5′ UTR or 3′ UTR), or both.

[0072] In some embodiments, the siRNA comprises a sense region and anti-sense region complementary to the sense region that together form an RNA duplex, and the sense region comprises a sequence at least 70% identical to a glypican-2 (GPC2) mRNA sequence. In some embodiments, the sense region is identical to a GPC2 mRNA sequence.

[0073] As used herein, the term “sense strand” or “sense region” refers to a nucleotide sequence of an siRNA molecule that is partially or fully complementary to at least a portion of a corresponding anti-sense strand or anti-sense region of the siRNA molecule. The sense strand of an siRNA molecule can include a nucleic acid sequence having some percentage identity with a target nucleic acid sequence such as a GPC2 mRNA sequence. In some cases, the sense region may have 100% identity, i.e. complete identity or homology, to the target nucleic acid sequence. In other cases, there may be one or more mismatches between the sense region and the target nucleic acid sequence. For example, there may be 1, 2, 3, 4, 5, 6, or 7 mismatches between the sense region and the target nucleic acid sequence.

[0074] As used herein, the term “anti-sense strand” or “anti-sense region” refers to a nucleotide sequence of an siRNA molecule that is partially or fully complementary to at least a portion of a target nucleic acid sequence. The anti-sense strand of an siRNA molecule can include a nucleic acid sequence that is complementary to at least a portion of a corresponding sense strand of the siRNA molecule.

[0075] In some embodiments, the sense region comprises a sequence that is at least 70% identical, at least 75% identical, at least 80% identical, at least 85% identical, at least 90% identical, at least 95% identical, at least 97% identical or 100% identical to a sequence of SEQ ID NO: 1 or SEQ ID NO: 2. In some embodiments, the sense region consists essentially of a sequence that is at least 70% identical, at least 75% identical, at least 80% identical, at least 85% identical, at least 90% identical, at least 95% identical, at least 97% identical or 100% identical to a sequence of SEQ ID NO: 1 or SEQ ID NO: 2. In some embodiments, the sense region comprises a sequence that is identical to a sequence of SEQ ID NO: 1 or SEQ ID NO: 2. In some embodiments, the sense region consists essentially of a sequence that is identical to a sequence of SEQ ID NO: 1 or SEQ ID NO: 2.

[0076] In some embodiments, the sense region of the siRNA targeting GPC2 has one or more mismatches between the sequence of the siRNA and the GPC2 sequence. For example, the sequence of the sense region may have 1, 2, 3, 4 or 5 mismatches between the sequence of the sense region of the siRNA and the GPC2 sequence. In some embodiments, the GPC2 sequence is a GPC2 3′ untranslated region sequence (3′ UTR). Without wishing to be bound by theory, it is thought that siRNAs targeting the 3′ UTR have elevated mismatch tolerance when compared to mismatches in siRNAs targeting coding regions of a gene. Further, siRNAs may be tolerant of mismatches outside the siRNA seed region. As used herein, the “seed region” of the siRNA refers to base pairs 2-8 of the anti-sense region of the siRNA, i.e. the strand of the siRNA that is complementary to and hybridizes to the target mRNA.

[0077] In some embodiments, the anti-sense region comprises a sequence that is at least 70% identical, at least 75% identical, at least 80% identical, at least 85% identical, at least 90% identical, at least 95% identical, at least 97% identical or 100% identical to a sequence complementary to a sequence of SEQ ID NO: 1 or SEQ ID NO: 2. In some embodiments, the anti-sense region consists essentially of a sequence that is at least 70% identical, at least 75% identical, at least 80% identical, at least 85% identical, at least 90% identical, at least 95% identical, at least 97% identical or 100% identical to a sequence complementary to a sequence of SEQ ID NO: 1 or SEQ ID NO: 2. In some embodiments, the anti-sense region comprises a sequence that is identical to a sequence complementary to a sequence of SEQ ID NO: 1 or SEQ ID NO: 2. In some embodiments, the sense region consists essentially of a sequence that is complementary to a sequence of SEQ ID NO: 1 or SEQ ID NO: 2.

[0078] The anti-sense region of the GPC2 targeting siRNA is complementary to the sense region. In some embodiments, the sense region and the anti-sense region are fully complementary (no mismatches). In some embodiments the anti-sense region is partially complementary to the sense region, i.e., there are 1, 2, 3, 4 or 5 mismatches between the sense region and the anti-sense region.

[0079] In general, siRNAs comprise an RNA duplex that is about 16 to about 25 nucleotides in length. In some embodiments, the RNA duplex is between 17 and 24 nucleotides in length, between about 18 and 23 nucleotides in length, or between about 19 and 22 nucleotides in length. In some embodiments, the RNA duplex is 19 nucleotides in length.

[0080] In some embodiments, the sense region is encoded by a first single stranded RNA molecule, and the anti-sense region is encoded by a second single stranded RNA molecule. In some embodiments, the siRNA targeting GPC2 comprises two different single stranded RNAs, the first comprising the sense region and the second comprising the anti-sense region, which hybridize to form an RNA duplex.

[0081] siRNAs of the disclosure can have one or more overhangs from the duplex region. The overhangs, which are non-base-paired, single strand regions, can be from one to eight nucleotides in length, or longer. An overhang can be a 3′ overhang, wherein the 3′-end of a strand has a single strand region of from one to eight nucleotides. An overhang can be a 5′ overhang, wherein the 5′-end of a strand has a single strand region of from one to eight nucleotides.

[0082] The overhangs of the siRNAs can be the same length, or can be different lengths.

[0083] siRNAs can have one or more blunt ends, in which the duplex region ends with no overhang, and the strands are base paired to the end of the duplex region. siRNAs of the disclosure can have one or more blunt ends, or can have one or more overhangs, or can have a combination of a blunt end and an overhang end. For example, the 5′ end of the siRNA can be blunt and the 3′ end of the same siRNA comprise an overhang, or vice versa.

[0084] In some embodiments, both ends of the siRNA are blunt ends.

[0085] In additional embodiments, both ends of siRNA have an overhang. In some embodiments, the overhang is a 3′ overhang, for example a 3′ dinucleotide overhang on each end. The overhangs at the 5′- and 3′-ends may be of different lengths, or be the same length.

[0086] An overhang of an siRNA can contain one or more deoxyribonucleotides, one or more ribonucleotides, or a combination of deoxyribonucleotides and ribonucleotides. In some embodiments, one, or both, of the overhang nucleotides of an siRNA may be 2′-deoxyribonucleotides.

[0087] In some embodiments, the first single stranded RNA molecule comprises a first 3′ overhang. In some embodiments, the second single stranded RNA molecule comprises a second 3′ overhang. In some embodiments, the first and second 3′ overhangs comprise a dinucleotide. In some embodiments, the dinucleotide comprises thymidine-thymidine (dT-dT) or Uracil-Uracil (UU). Without wishing to be bound by theory, it is thought that 3′ overhangs, such as dinucleotide overhangs, enhance siRNA mediated mRNA degradation by enhancing siRNA-RISC complex formation, and/or rate of cleavage of the target mRNA by the siRNA-RISC complex.

[0088] In some embodiments, the sense region comprises a sequence selected from the group listed in Table 1 and Table 2. In some embodiments, the anti-sense region comprises a sequence selected from the group listed in Table 1 or Table 2. In some embodiments, the sense and anti-sense regions comprise complementary sequences selected from the group listed in Table 1 and Table 2.

TABLE 1
Sense and anti-sense regions of
representative GPC2 siRNAs

| Sense Region | Anti-sense Region |
|---|---|
| CUCCUGAUCCUGGCUGAUA | UAUCAGCCAGGAUCAGGAG |
| (SEQ ID NO: 9) | (SEQ ID NO: 10) |
| CUCAUCUACCGAUGGCUCU | AGAGCCAUCGGUAGAUGAG |
| (SEQ ID NO: 11) | (SEQ ID NO: 12) |
| CCUGCUUGGACCUCGAUAA | UUAUCGAGGUCCAAGCAGG |
| (SEQ ID NO: 3) | (SEQ ID NO: 6) |
| GUGGUUCGUGGCUGUCUCA | UGAGACAGCCACGAACCAC |
| (SEQ ID NO: 13) | (SEQ ID NO: 14) |
| CUCAGUAGCCCAGCACUCU | AGAGUGCUGGGCUACUGAG |
| (SEQ ID NO: 4) | (SEQ ID NO: 7) |
| CUGCUGUUCCAGUGAGACA | UGUCUCACUGGAACAGCAG |
| (SEQ ID NO: 15) | (SEQ ID NO: 16) |
| CUCCUUUCUGGUUCACACA | UGUGUGAACCAGAAAGGAG |
| (SEQ ID NO: 5) | (SEQ ID NO: 8) |
| GAGUGUGGUUUCCUUAGAA | UUCUAAGGAAACCACACUC |
| (SEQ ID NO: 17) | (SEQ ID NO: 18) |
| GAGUACACCUGCUGUUCCA | UGGAACAGCAGGUGUACUC |
| (SEQ ID NO: 19) | (SEQ ID NO: 20) |
| GACACGACCUGGACGGGCA | UGCCCGUCCAGGUCGUGUC |
| (SEQ ID NO: 21) | (SEQ ID NO: 22) |
| CUGACUACCUGCUCUGCCU | AGGCAGAGCAGGUAGUCAG |
| (SEQ ID NO: 23) | (SEQ ID NO: 24) |
| GCGCUUAAGGUGCCGGUGU | ACACCGGCACCUUAAGCGC |
| (SEQ ID NO: 25) | (SEQ ID NO: 26) |
| CCUUUGAGCUGACGGCCGA | UCGGCCGUCAGCUCAAAGG |
| (SEQ ID NO: 27) | (SEQ ID NO: 28) |
| CCUGCUUCUGCUGCUGCCU | AGGCAGCAGCAGAAGCAGG |
| (SEQ ID NO: 29) | (SEQ ID NO: 30) |
| GAAGAAAUGUGGUCAGCGA | UCGCUGACCACAUUUCUUC |
| (SEQ ID NO: 31) | (SEQ ID NO: 32) |

[0089] In some embodiments, the sense region comprises a sequence of CCUGCUUGGACCUCGAUAA (SEQ ID NO: 3), CUCAGUAGCCCAGCACUCU (SEQ ID NO: 4) or CUCCUUUCUGGUUCACACA (SEQ ID NO: 5). In some embodiments, the anti-sense region comprises a sequence complementary to the sense region.

[0090] In some embodiments, the sense region comprises a sequence of CUCCUGAUCCUGGCUGAUA (SEQ ID NO: 9) and the anti-sense region comprises a sequence of UAUCAGCCAGGAUCAGGAG (SEQ ID NO: 10).

[0091] In some embodiments, the sense region comprises a sequence of CUCAUCUACCGAUGGCUCU (SEQ ID NO: 11) and the anti-sense region comprises a sequence of AGAGCCAUCGGUAGAUGAG (SEQ ID NO: 12).

[0092] In some embodiments, the sense region comprises a sequence of GUGGUUCGUGGCUGUCUCA (SEQ ID NO: 13) and the anti-sense region comprises a sequence of UGAGACAGCCACGAACCAC (SEQ ID NO: 14).

[0093] In some embodiments, the sense region comprises a sequence of CUGCUGUUCCAGUGAGACA (SEQ ID NO: 15) and the anti-sense region comprises a sequence of UGUCUCACUGGAACAGCAG (SEQ ID NO: 16).

[0094] In some embodiments, the sense region comprises a sequence of GAGUGUGGUUUCCUUAGAA (SEQ ID NO: 17) and the anti-sense region comprises a sequence of UUCUAAGGAAACCACACUC (SEQ ID NO: 18).

[0095] In some embodiments, the sense region comprises a sequence of GAGUACACCUGCUGUUCCA (SEQ ID NO: 19) and the anti-sense region comprises a sequence of UGGAACAGCAGGUGUACUC (SEQ ID NO: 20).

[0096] In some embodiments, the sense region comprises a sequence of GACACGACCUGGACGGGCA (SEQ ID NO: 21) and the anti-sense region comprises a sequence of UGCCCGUCCAGGUCGUGUC (SEQ ID NO: 22).

[0097] In some embodiments, the sense region comprises a sequence of CUGACUACCUGCUCUGCCU (SEQ ID NO: 23) and the anti-sense region comprises a sequence of AGGCAGAGCAGGUAGUCAG (SEQ ID NO: 24).

[0098] In some embodiments, the sense region comprises a sequence of GCGCUUAAGGUGCCGGUGU (SEQ ID NO: 25) and the anti-sense region comprises a sequence of ACACCGGCACCUUAAGCGC (SEQ ID NO: 26).

[0099] In some embodiments, the sense region comprises a sequence of CCUUUGAGCUGACGGCCGA (SEQ ID NO: 27) and the anti-sense region comprises a sequence of UCGGCCGUCAGCUCAAAGG (SEQ ID NO: 28).

[0100] In some embodiments, the sense region comprises a sequence of CCUGCUUCUGCUGCUGCCU (SEQ ID NO: 29) and the anti-sense region comprises a sequence of AGGCAGCAGCAGAAGCAGG (SEQ ID NO: 30).

[0101] In some embodiments, the sense region comprises a sequence of GAAGAAAUGUGGUCAGCGA (SEQ ID NO: 31) and the anti-sense region comprises a sequence of UCGCUGACCACAUUUCUUC (SEQ ID NO: 32).

[0102] In some embodiments, the sense region comprises a sequence of CCUGCUUGGACCUCGAUAA (SEQ ID NO: 3) and the anti-sense region comprises a sequence of UUAUCGAGGUCCAAGCAGG (SEQ ID NO: 6).

[0103] In some embodiments, the sense region comprises a sequence of CUCAGUAGCCCAGCACUCU (SEQ ID NO: 4) and the anti-sense region comprises a sequence of AGAGUGCUGGGCUACUGAG (SEQ ID NO: 7).

[0104] In some embodiments, the sense region comprises a sequence of CUCCUUUCUGGUUCACACA (SEQ ID NO: 5) and the anti-sense region comprises a sequence of UGUGUGAACCAGAAAGGAG (SEQ ID NO: 8).

TABLE 2
Sense and anti-sense regions of
representative GPC2 siRNAs

| Sense Region | Anti-sense Region |
|---|---|
| GGCUCCUUUCUGGUUCACA | UGUGAACCAGAAAGGAGCC |
| (SEQ ID NO: 33) | (SEQ ID NO: 34) |
| GCCUGGAGACUGGAAGAAA | UUUCUUCCAGUCUCCAGGC |
| (SEQ ID NO: 35) | (SEQ ID NO: 36) |
| GCAACUAUCUGGAUGGUCU | AGACCAUCCAGAUAGUUGC |
| (SEQ ID NO: 37) | (SEQ ID NO: 38) |
| GACUGAGGGUGCUUGAGUA | UACUCAAGCACCCUCAGUC |
| (SEQ ID NO: 39) | (SEQ ID NO: 40) |
| GUGCUUGAGUAGGAUGUGA | UCACAUCCUACUCAAGCAC |
| (SEQ ID NO: 41) | (SEQ ID NO: 42) |
| GCUUGAGUAGGAUGUGAGA | UCUCACAUCCUACUCAAGC |
| (SEQ ID NO: 43) | (SEQ ID NO: 44) |
| GUAGGAUGUGAGACUUCAU | AUGAAGUCUCACAUCCUAC |
| (SEQ ID NO: 45) | (SEQ ID NO: 46) |
| CCUCCUUAGGACCCACUUU | AAAGUGGGUCCUAAGGAGG |
| (SEQ ID NO: 47) | (SEQ ID NO: 48) |
| GCUGCGACCUCUCCUGCUU | AAGCAGGAGAGGUCGCAGC |
| (SEQ ID NO: 49) | (SEQ ID NO: 50) |
| GCACGCCCUCAUAUUCAAU | AUUGAAUAUGAGGGCGUGC |
| (SEQ ID NO: 51) | (SEQ ID NO: 52) |
| GGAUGACACCCUGGCGGAU | AUCCGCCAGGGUGUCAUCC |
| (SEQ ID NO: 53) | (SEQ ID NO: 54) |
| CCUGGAGACUGGAAGAAAU | AUUUCUUCCAGUCUCCAGG |
| (SEQ ID NO: 55) | (SEQ ID NO: 56) |
| GCCAGGGCUUCUGCCUCAA | UUGAGGCAGAAGCCCUGGC |
| (SEQ ID NO: 57) | (SEQ ID NO: 58) |
| GCUGACGGCCGAGUCCAUU | AAUGGACUCGGCCGUCAGC |
| (SEQ ID NO: 59) | (SEQ ID NO: 60) |
| CCCUAGCAUCAGAAGGGUU | AACCCUUCUGAUGCUAGGG |
| (SEQ ID NO: 61) | (SEQ ID NO: 62) |
| CCACCCACAUCCUUCACAA | UUGUGAAGGAUGUGGGUGG |
| (SEQ ID NO: 63) | (SEQ ID NO: 64) |
| CCAUGUUUAUUCUGCAAAU | AUUUGCAGAAUAAACAUGG |
| (SEQ ID NO: 65) | (SEQ ID NO: 66) |
| GCUAUCGUGCUCGGUAUUCA | UGAAUACCGAGCACGAUAGC |
| (SEQ ID NO: 67) | (SEQ ID NO: 68) |
| AUCGUGCUCGGUAUUCAGUU | AACUGAAUACCGAGCACGAU |
| (SEQ ID NO: 69) | (SEQ ID NO: 70) |
| GCUCUGCUUUCCUCCUUAGG | CCUAAGGAGGAAAGCAGAGC |
| (SEQ ID NO: 71) | (SEQ ID NO: 72) |
| GCUUCUGCUGCUGCCUCUGU | ACAGAGGCAGCAGCAGAAGC |
| (SEQ ID NO: 73) | (SEQ ID NO: 74) |
| GGGAGCGAGGCAAAGGUCAC | GUGACCUUUGCCUCGCUCCC |
| (SEQ ID NO: 75) | (SEQ ID NO: 76) |
| GCAAAGGUCACCCGGAGUUG | CAACUCCGGGUGACCUUUGC |
| (SEQ ID NO: 77) | (SEQ ID NO: 78) |
| GGGAUAUAGCUUAAACCUAA | UUAGGUUUAAGCUAUAUCCC |
| (SEQ ID NO: 79) | (SEQ ID NO: 80) |
| GGAUAUAGCUUAAACCUAAU | AUUAGGUUUAAGCUAUAUCC |
| (SEQ ID NO: 81) | (SEQ ID NO: 82) |
| GUGAGCACCUCCGGGUCUGU | ACAGACCCGGAGGUGCUCAC |
| (SEQ ID NO: 83) | (SEQ ID NO: 84) |
| GAGCACCUCCGGGUCUGUCC | GGACAGACCCGGAGGUGCUC |
| (SEQ ID NO: 85) | (SEQ ID NO: 86) |
| GGGUCUGUCCCCAGGAGUAC | GUACUCCUGGGGACAGACCC |
| (SEQ ID NO: 87) | (SEQ ID NO: 88) |
| GGUCUGUCCCCAGGAGUACA | UGUACUCCUGGGGACAGACC |
| (SEQ ID NO: 89) | (SEQ ID NO: 90) |
| GUCUGUCCCCAGGAGUACAC | GUGUACUCCUGGGGACAGAC |
| (SEQ ID NO: 91) | (SEQ ID NO: 92) |
| GCGGCUCCUUUCUGGUUCAC | GUGAACCAGAAAGGAGCCGC |
| (SEQ ID NO: 93) | (SEQ ID NO: 94) |
| GGCUCCUUUCUGGUUCACAC | GUGUGAACCAGAAAGGAGCC |
| (SEQ ID NO: 95) | (SEQ ID NO: 96) |
| GCUCUUCUCCCACUCCUACG | CGUAGGAGUGGGAGAAGAGC |
| (SEQ ID NO: 97) | (SEQ ID NO: 98) |
| GCCCAGCACGCCCUCAUAUU | AAUAUGAGGGCGUGCUGGGC |
| (SEQ ID NO: 99) | (SEQ ID NO: 100) |
| GCACGCCCUCAUAUUCAAUG | CAUUGAAUAUGAGGGCGUGC |
| (SEQ ID NO: 101) | (SEQ ID NO: 102) |
| GCUGCUGCACCCACAGUACA | UGUACUGUGGGUGCAGCAGC |
| (SEQ ID NO: 103) | (SEQ ID NO: 104) |
| GGCCUGGAGACUGGAAGAAA | UUUCUUCCAGUCUCCAGGCC |
| (SEQ ID NO: 105) | (SEQ ID NO: 106) |
| GCCUGGAGACUGGAAGAAAU | AUUUCUUCCAGUCUCCAGGC |
| (SEQ ID NO: 107) | (SEQ ID NO: 108) |
| GCUUAAGGUGCCGGUGUCUG | CAGACACCGGCACCUUAAGC |
| (SEQ ID NO: 109) | (SEQ ID NO: 110) |
| GGCAACUAUCUGGAUGGUCU | AGACCAUCCAGAUAGUUGCC |
| (SEQ ID NO: 111) | (SEQ ID NO: 112) |
| GCAACUAUCUGGAUGGUCUC | GAGACCAUCCAGAUAGUUGC |
| (SEQ ID NO: 113) | (SEQ ID NO: 114) |
| GGAAAACAGUGCGAAGGUGU | ACACCUUCGCACUGUUUUCC |
| (SEQ ID NO: 115) | (SEQ ID NO: 116) |
| GAAAACAGUGCGAAGGUGUC | GACACCUUCGCACUGUUUUC |
| (SEQ ID NO: 117) | (SEQ ID NO: 118) |
| GGACAGCAGUAUGCAGAUGA | UCAUCUGCAUACUGCUGUCC |
| (SEQ ID NO: 119) | (SEQ ID NO: 120) |
| GACAGCAGUAUGCAGAUGAC | GUCAUCUGCAUACUGCUGUC |
| (SEQ ID NO: 121) | (SEQ ID NO: 122) |
| ACAGCAGUAUGCAGAUGACU | AGUCAUCUGCAUACUGCUGU |
| (SEQ ID NO: 123) | (SEQ ID NO: 124) |
| GCCUCCUCGGCCUCCAUACC | GGUAUGGAGGCCGAGGAGGC |
| (SEQ ID NO: 125) | (SEQ ID NO: 126) |
| GGCCUCCAUACCCUCCUAGA | UCUAGGAGGGUAUGGAGGCC |
| (SEQ ID NO: 127) | (SEQ ID NO: 128) |
| GCCUCCAUACCCUCCUAGAA | UUCUAGGAGGGUAUGGAGGC |
| (SEQ ID NO: 129) | (SEQ ID NO: 130) |
| ACCCAAACCAUCCUCAUUCU | AGAAUGAGGAUGGUUUGGGU |
| (SEQ ID NO: 131) | (SEQ ID NO: 132) |
| GGGUGCCCUAGCAUCAGAAG | UUCUGAUGCUAGGGCACCC |
| (SEQ ID NO: 133) | (SEQ ID NO: 134) |
| GGGCUGCAGAGAGGGUAGAG | CUCUACCCUCUCUGCAGCCC |
| (SEQ ID NO: 135) | (SEQ ID NO: 136) |
| GGCUGCAGAGAGGGUAGAGA | UCUCUACCCUCUCUGCAGCC |
| (SEQ ID NO: 137) | (SEQ ID NO: 138) |
| GCUGCAGAGAGGGUAGAGAA | UUCUCUACCCUCUCUGCAGC |
| (SEQ ID NO: 139) | (SEQ ID NO: 140) |
| GAGGGUAGAGAAGGGACUUU | AAAGUCCCUUCUCUACCCUC |
| (SEQ ID NO: 141) | (SEQ ID NO: 142) |
| AUUUAUUUAGGAGGGAGUGU | ACACUCCCUCCUAAAUAAAU |
| (SEQ ID NO: 143) | (SEQ ID NO: 144) |
| GGUGAUCAGCCCCAACAGAG | CUCUGUUGGGGCUGAUCACC |
| (SEQ ID NO: 145) | (SEQ ID NO: 146) |
| AGCCCCAACAGAGAAAAUGA | UCAUUUUCUCUGUUGGGGCU |
| (SEQ ID NO: 147) | (SEQ ID NO: 148) |
| GCCCCAACAGAGAAAAUGAG | CUCAUUUUCUCUGUUGGGGC |
| (SEQ ID NO: 149) | (SEQ ID NO: 150) |
| AACAGAGAAAAUGAGGAGUU | AACUCCUCAUUUUCUCUGUU |
| (SEQ ID NO: 151) | (SEQ ID NO: 152) |
| GAGAAAAUGAGGAGUUUAGA | UCUAAACUCCUCAUUUUCUC |
| (SEQ ID NO: 153) | (SEQ ID NO: 154) |
| GAAAAUGAGGAGUUUAGAGU | ACUCUAAACUCCUCAUUUUC |
| (SEQ ID NO: 155) | (SEQ ID NO: 156) |
| AAAAUGAGGAGUUUAGAGUU | AACUCUAAACUCCUCAUUUU |
| (SEQ ID NO: 157) | (SEQ ID NO: 158) |
| GGGACUGAGGGUGCUUGAGU | ACUCAAGCACCCUCAGUCCC |
| (SEQ ID NO: 159) | (SEQ ID NO: 160) |
| GGACUGAGGGUGCUUGAGUA | UACUCAAGCACCCUCAGUCC |
| (SEQ ID NO: 161) | (SEQ ID NO: 162) |
| GACUGAGGGUGCUUGAGUAG | CUACUCAAGCACCCUCAGUC |
| (SEQ ID NO: 163) | (SEQ ID NO: 164) |
| GGUGCUUGAGUAGGAUGUGA | UCACAUCCUACUCAAGCACC |
| (SEQ ID NO: 165) | (SEQ ID NO: 166) |
| GUGCUUGAGUAGGAUGUGAG | CUCACAUCCUACUCAAGCAC |
| (SEQ ID NO: 167) | (SEQ ID NO: 168) |
| GCUUGAGUAGGAUGUGAGAC | GUCUCACAUCCUACUCAAGC |
| (SEQ ID NO: 169) | (SEQ ID NO: 170) |
| GUAGGAUGUGAGACUUCAUG | CAUGAAGUCUCACAUCCUAC |
| (SEQ ID NO: 171) | (SEQ ID NO: 172) |
| GGGUGCUCAUCUCGUGACCU | AGGUCACGAGAUGAGCACCC |
| (SEQ ID NO: 173) | (SEQ ID NO: 174) |
| GGUGCUCAUCUCGUGACCUC | GAGGUCACGAGAUGAGCACC |
| (SEQ ID NO: 175) | (SEQ ID NO: 176) |
| GUGCUCAUCUCGUGACCUCU | AGAGGUCACGAGAUGAGCAC |
| (SEQ ID NO: 177) | (SEQ ID NO: 178) |
| GCCACCCACAUCCUUCACAA | UUGUGAAGGAUGUGGGUGGC |
| (SEQ ID NO: 179) | (SEQ ID NO: 180) |
| ACCCACAUCCUUCACAAACU | AGUUUGUGAAGGAUGUGGGU |
| (SEQ ID NO: 181) | (SEQ ID NO: 182) |
| GCAAAUAAAUGGUAAUGUAU | AUACAUUACCAUUUAUUUGC |
| (SEQ ID NO: 183) | (SEQ ID NO: 184) |
| GGGAUAUAGCUUAAACCUAAU | AUUAGGUUUAAGCUAUAUCCC |
| (SEQ ID NO: 185) | (SEQ ID NO: 186) |
| GGCCUGGAGACUGGAAGAAAU | AUUUCUUCCAGUCUCCAGGCC |
| (SEQ ID NO: 187) | (SEQ ID NO: 188) |
| GGGCAACUAUCUGGAUGGUCU | AGACCAUCCAGAUAGUUGCCC |
| (SEQ ID NO: 189) | (SEQ ID NO: 190) |
| GGGACAGCAGUAUGCAGAUGA | UCAUCUGCAUACUGCUGUCCC |
| (SEQ ID NO: 191) | (SEQ ID NO: 192) |
| GACAGCAGUAUGCAGAUGACU | AGUCAUCUGCAUACUGCUGUC |
| (SEQ ID NO: 193) | (SEQ ID NO: 194) |
| GGGUGCUUGAGUAGGAUGUGA | UCACAUCCUACUCAAGCACCC |
| (SEQ ID NO: 195) | (SEQ ID NO: 196) |
| GUGCUUGAGUAGGAUGUGAGA | UCUCACAUCCUACUCAAGCAC |
| (SEQ ID NO: 197) | (SEQ ID NO: 198) |
| GCUUGAGUAGGAUGUGAGACU | AGUCUCACAUCCUACUCAAGC |
| (SEQ ID NO: 199) | (SEQ ID NO: 200) |
| GCCACCCACAUCCUUCACAAA | UUUGUGAAGGAUGUGGGUGGC |
| (SEQ ID NO: 201) | (SEQ ID NO: 202) |

[0105] In some embodiments, the siRNA targeting GPC2 comprises a sense region encoded by a first single stranded RNA molecule and an anti-sense region is encoded by a second single stranded RNA molecule, the anti-sense region is complementary to the sense region, and the first and second single stranded RNA molecules further comprise 3′ overhangs. In some embodiments, the first single stranded RNA comprises or consists essentially of a sequence selected from the group listed in Table 3. In some embodiments, the second single stranded RNA comprises or consists essentially of a sequence selected from the group listed in Table 3. In some embodiments, the first and second single stranded RNAs are complementary sequences, exclusive of the 3′ overhangs, selected from the group listed in Table 3.

[0106] Exemplary sequences of first single stranded RNAs comprising the sense region and second single stranded RNAs comprising the anti-sense region, with dinucleotide 3′ overhangs are shown in table 3 below. Each row of the table shows pairs of first and second single stranded RNAs capable of hybridizing to form the mature duplex siRNA.

TABLE 3
Representative GPC2 siRNAs

| Sense | Anti-sense |
|---|---|
| CUCCUGAUCCUGGCUGAUA | UAUCAGCCAGGAUCAGGAG[dT][dT] |
| [dT][dT] | |
| (SEQ ID NO: 203) | (SEQ ID NO: 204) |
| CUCAUCUACCGAUGGCUCU | AGAGCCAUCGGUAGAUGAG[dT][dT] |
| [dT][dT] | |
| (SEQ ID NO: 205) | (SEQ ID NO: 206) |
| CCUGCUUGGACCUCGAUAA | UUAUCGAGGUCCAAGCAGG[dT][dT] |
| [dT][dT] | |
| (SEQ ID NO: 207) | (SEQ ID NO: 208) |
| GUGGUUCGUGGCUGUCUCA | UGAGACAGCCACGAACCAC[dT][dT] |
| [dT][dT] | |
| (SEQ ID NO: 209) | (SEQ ID NO: 210) |
| CUCAGUAGCCCAGCACUCU | AGAGUGCUGGGCUACUGAG[dT][dT] |
| [dT][dT] | |
| (SEQ ID NO: 211) | (SEQ ID NO: 212) |
| CUGCUGUUCCAGUGAGACA | UGUCUCACUGGAACAGCAG[dT][dT] |
| [dT][dT] | |
| (SEQ ID NO: 213) | (SEQ ID NO: 214) |
| CUCCUUUCUGGUUCACACA | UGUGUGAACCAGAAAGGAG[dT][dT] |
| [dT][dT] | |
| (SEQ ID NO: 215) | (SEQ ID NO: 216) |
| GAGUGUGGUUUCCUUAGAA | UUCUAAGGAAACCACACUC[dT][dT] |
| [dT][dT] | |
| (SEQ ID NO: 217) | (SEQ ID NO: 218) |
| GAGUACACCUGCUGUUCCA | UGGAACAGCAGGUGUACUC[dT][dT] |
| [dT][dT] | |
| (SEQ ID NO: 219) | (SEQ ID NO: 220) |
| GACACGACCUGGACGGGCA | UGCCCGUCCAGGUCGUGUC[dT][dT] |
| [dT][dT] | |
| (SEQ ID NO: 221) | (SEQ ID NO: 222) |
| CUGACUACCUGCUCUGCCU | AGGCAGAGCAGGUAGUCAG[dT][dT] |
| [dT][dT] | |
| (SEQ ID NO: 223) | (SEQ ID NO: 224) |
| GCGCUUAAGGUGCCGGUGU | ACACCGGCACCUUAAGCGC[dT][dT] |
| [dT][dT] | |
| (SEQ ID NO: 225) | (SEQ ID NO: 226) |
| CCUUUGAGCUGACGGCCGA | UCGGCCGUCAGCUCAAAGG[dT][dT] |
| [dT][dT] | |
| (SEQ ID NO: 227) | (SEQ ID NO: 228) |
| CCUGCUUCUGCUGCUGCCU | AGGCAGCAGCAGAAGCAGG[dT][dT] |
| [dT][dT] | |
| (SEQ ID NO: 229) | (SEQ ID NO: 230) |
| GAAGAAAUGUGGUCAGCGA | UCGCUGACCACAUUUCUUC[dT][dT] |
| [dT][dT] | |
| (SEQ ID NO: 231) | (SEQ ID NO: 232) |

[0107] Unless otherwise indicated, sequences in the Tables refer to ribonucleic acids (RNA). d[T] refers to deoxyribonucleic acids (DNA).

[0108] siRNAs can be designed using commercially available design tools and kits, such as those available from Ambion, Inc. (Austin, Tex.), the Whitehead Institute of Biomedical Research at MIT (Cambridge, Mass.), Invivogen (www.invivogen.com/sirnawizard/siRNA.php) and ThermoFisher (rnaidesigner.thermofisher.com/rnaiexpress/design.do) allow for the design and production of siRNA. siRNAs can also be designed using the Designer of Small Interfering RNA (DSIR) web-based tool available at biodev.extra.cea.fr/DSIR/DSIR.html. Using DSIR, siRNAs are designed and given a score based on the predicted efficacy of the siRNA based on a 19 or 21 nucleotide model.

[0109] In some embodiments, the siRNA comprises an RNA duplex that is 21 nucleotides in length. In some embodiments, the RNA duplex comprises a sense region and an antisense region that are selected from the group of sequences in Table 4.

TABLE 4
siRNA sense regions and anti-sense regions, 21 bp in length

| | SEQ | | SEQ | | | Corr. |
|---|---|---|---|---|---|---|
| Pos. | ID NO: | Sense Region | ID NO: | Antisense Region | Score | Score |
| 1 | 233 | UCCCAUUGUCUCGGCAGAUGC | 1477 | AUCUGCCGAGACAAUGGGAGC | 60.2 | 60.2 |
| 2 | 234 | CCCAUUGUCUCGGCAGAUGCC | 1478 | CAUCUGCCGAGACAAUGGGAG | 67.5 | 67.5 |
| 3 | 235 | CCAUUGUCUCGGCAGAUGCCG | 1479 | GCAUCUGCCGAGACAAUGGGA | 68.3 | 68.3 |
| 4 | 236 | CAUUGUCUCGGCAGAUGCCGC | 1480 | GGCAUCUGCCGAGACAAUGGG | 64.7 | 64.7 |
| 5 | 237 | AUUGUCUCGGCAGAUGCCGCC | 1481 | CGGCAUCUGCCGAGACAAUGG | 49.5 | 49.5 |
| 6 | 238 | UUGUCUCGGCAGAUGCCGCCU | 1482 | GCGGCAUCUGCCGAGACAAUG | 48.4 | 48.4 |
| 7 | 239 | UGUCUCGGCAGAUGCCGCCUG | 1483 | GGCGGCAUCUGCCGAGACAAU | 43.5 | 43.5 |
| 8 | 240 | GUCUCGGCAGAUGCCGCCUGG | 1484 | AGGCGGCAUCUGCCGAGACAA | 61.2 | 61.2 |
| 9 | 241 | UCUCGGCAGAUGCCGCCUGGU | 1485 | CAGGCGGCAUCUGCCGAGACA | 49.5 | 49.5 |
| 10 | 242 | CUCGGCAGAUGCCGCCUGGUC | 1486 | CCAGGCGGCAUCUGCCGAGAC | 47.8 | 47.8 |
| 11 | 243 | UCGGCAGAUGCCGCCUGGUCC | 1487 | ACCAGGCGGCAUCUGCCGAGA | 55 | 55 |
| 12 | 244 | CGGCAGAUGCCGCCUGGUCCA | 1488 | GACCAGGCGGCAUCUGCCGAG | 65.2 | 65.2 |
| 13 | 245 | GGCAGAUGCCGCCUGGUCCAG | 1489 | GGACCAGGCGGCAUCUGCCGA | 61.6 | 61.6 |
| 14 | 246 | GCAGAUGCCGCCUGGUCCAGC | 1490 | UGGACCAGGCGGCAUCUGCCG | 79.9 | 79.9 |
| 15 | 247 | CAGAUGCCGCCUGGUCCAGCU | 1491 | CUGGACCAGGCGGCAUCUGCC | 52 | 52 |
| 16 | 248 | AGAUGCCGCCUGGUCCAGCAU | 1492 | GCUGGACCAGGCGGCAUCUGC | 42.4 | 42.4 |
| 17 | 249 | GAUGCCGCCUGGUCCAGCUAU | 1493 | AGCUGGACCAGGCGGCAUCUG | 71.1 | 71.1 |
| 18 | 250 | AUGCCGCCUGGUCCAGCUAUC | 1494 | UAGCUGGACCAGGCGGCAUCU | 71.4 | 71.4 |
| 19 | 251 | UGCCGCCUGGUCCAGCUAUCG | 1495 | AUAGCUGGACCAGGCGGCAUC | 61.3 | 61.3 |
| 20 | 252 | GCCGCCUGGUCCAGCUAUCGU | 1496 | GAUAGCUGGACCAGGCGGCAU | 66.6 | 66.6 |
| 21 | 253 | CCGCCUGGUCCAGCUAUCGUG | 1497 | CGAUAGCUGGACCAGGCGGCA | 57.7 | 57.7 |
| 22 | 254 | CGCCUGGUCCAGCUAUCGUGC | 1498 | ACGAUAGCUGGACCAGGCGGC | 68.2 | 68.2 |
| 23 | 255 | GCCUGGUCCAGCUAUCGUGCU | 1499 | CACGAUAGCUGGACCAGGCGG | 73.4 | 73.4 |
| 24 | 256 | CCUGGUCCAGCUAUCGUGCUC | 1500 | GCACGAUAGCUGGACCAGGCG | 61.3 | 61.3 |
| 25 | 257 | CUGGUCCAGCUAUCGUGCUCG | 1501 | AGCACGAUAGCUGGACCAGGC | 61.9 | 61.9 |
| 26 | 258 | UGGUCCAGCUAUCGUGCUCGG | 1502 | GAGCACGAUAGCUGGACCAGG | 64 | 64 |
| 27 | 259 | GGUCCAGCUAUCGUGCUCGGU | 1503 | CGAGCACGAUAGCUGGACCAG | 64.4 | 64.4 |
| 28 | 260 | GUCCAGCUAUCGUGCUCGGUA | 1504 | CCGAGCACGAUAGCUGGACCA | 64 | 64 |
| 29 | 261 | UCCAGCUAUCGUGCUCGGUAU | 1505 | ACCGAGCACGAUAGCUGGACC | 49.2 | 49.2 |
| 30 | 262 | CCAGCUAUCGUGCUCGGUAUU | 1506 | UACCGAGCACGAUAGCUGGAC | 78.1 | 78.1 |
| 31 | 263 | CAGCUAUCGUGCUCGGUAUUC | 1507 | AUACCGAGCACGAUAGCUGGA | 87 | 87 |
| 32 | 264 | AGCUAUCGUGCUCGGUAUUCA | 1508 | AAUACCGAGCACGAUAGCUGG | 82.9 | 82.9 |
| 33 | 265 | GCUAUCGUGCUCGGUAUUCAG | 1509 | GAAUACCGAGCACGAUAGCUG | 65.9 | 65.9 |
| 34 | 266 | CUAUCGUGCUCGGUAUUCAGU | 1510 | UGAAUACCGAGCACGAUAGCU | 79 | 79 |
| 35 | 267 | UAUCGUGCUCGGUAUUCAGUU | 1511 | CUGAAUACCGAGCACGAUAGC | 60.2 | 60.2 |
| 36 | 268 | AUCGUGCUCGGUAUUCAGUUU | 1512 | ACUGAAUACCGAGCACGAUAG | 64.9 | 64.9 |
| 55 | 269 | UUUCCGGAGCAGCGCUCUUUC | 1513 | AAGAGCGCUGCUCCGGAAAAC | 59.4 | 59.4 |
| 56 | 270 | UUCCGGAGCAGCGCUCUUUCU | 1514 | AAAGAGCGCUGCUCCGGAAAA | 59.6 | 59.6 |
| 57 | 271 | UCCGGAGCAGCGCUCUUUCUC | 1515 | GAAAGAGCGCUGCUCCGGAAA | 56.3 | 56.3 |
| 58 | 272 | CCGGAGCAGCGCUCUUUCUCU | 1516 | AGAAAGAGCGCUGCUCCGGAA | 75.8 | 75.8 |
| 59 | 273 | CGGAGCAGCGCUCUUUCUCUG | 1517 | GAGAAAGAGCGCUGCUCCGGA | 66.5 | 66.5 |
| 60 | 274 | GGAGCAGCGCUCUUUCUCUGG | 1518 | AGAGAAAGAGCGCUGCUCCGG | 80.4 | 80.4 |
| 79 | 275 | GGCCCGCGGAGCGGUCCCGCG | 1519 | CGGGACCGCUCCGCGGGCCAG | 53.9 | 53.9 |
| 80 | 276 | GCCCGCGGAGCGGUCCCGCGG | 1520 | GCGGGACCGCUCCGCGGGCCA | 42.7 | 42.7 |
| 81 | 277 | CCCGCGGAGCGGUCCCGCGGC | 1521 | CGCGGGACCGCUCCGCGGGCC | 47.6 | 47.6 |
| 82 | 278 | CCGCGGAGCGGUCCCGCGGCC | 1522 | CCGCGGGACCGCUCCGCGGGC | 52.7 | 52.7 |
| 83 | 279 | CGCGGAGCGGUCCCGCGGCCG | 1523 | GCCGCGGGACCGCUCCGCGGG | 56.2 | 56.2 |
| 84 | 280 | GCGGAGCGGUCCCGCGGCCGA | 1524 | GGCCGCGGGACCGCUCCGCGG | 57.1 | 57.1 |
| 85 | 281 | CGGAGCGGUCCCGCGGCCGAG | 1525 | CGGCCGCGGGACCGCUCCGCG | 49.2 | 49.2 |
| 86 | 282 | GGAGCGGUCCCGCGGCCGAGU | 1526 | UCGGCCGCGGGACCGCUCCGC | 74.8 | 74.8 |
| 87 | 283 | GAGCGGUCCCGCGGCCGAGUA | 1527 | CUCGGCCGCGGGACCGCUCCG | 80.8 | 60.8 |
| 88 | 284 | AGCGGUCCCGCGGCCGAGUAC | 1528 | ACUCGGCCGCGGGACCGCUCC | 54.5 | 54.5 |
| 89 | 285 | GCGGUCCCGCGGCCGAGUACC | 1529 | UACUCGGCCGCGGGACCGCUC | 73.9 | 73.9 |
| 90 | 286 | CGGUCCCGCGGCCGAGUACCG | 1530 | GUACUCGGCCGCGGGACCGCU | 62.1 | 62.1 |
| 91 | 287 | GGUCCCGCGGCCGAGUACCGG | 1531 | GGUACUCGGCCGCGGGACCGC | 50.3 | 50.3 |
| 92 | 288 | GUCCCGCGGCCGAGUACCGGA | 1532 | CGGUACUCGGCCGCGGGACCG | 55.9 | 55.9 |
| 93 | 289 | UCCCGCGGCCGAGUACCGGAU | 1533 | CCGGUACUCGGCCGCGGGACC | 31.9 | 31.9 |
| 94 | 290 | CCCGCGGCCGAGUACCGGAUU | 1534 | UCCGGUACUCGGCCGCGGGAC | 68.6 | 68.6 |
| 95 | 291 | CCGCGGCCGAGUACCGGAUUC | 1535 | AUCCGGUACUCGGCCGCGGGA | 76.3 | 76.3 |
| 96 | 292 | CGCGGCCGAGUACCGGAUUCC | 1536 | AAUCCGGUACUCGGCCGCGGG | 77.9 | 77.9 |
| 97 | 293 | GCGGCCGAGUACCGGAUUCGC | 1537 | GAAUCCGGUACUCGGCCGCGG | 71.7 | 71.7 |
| 98 | 294 | CGGCCGAGUACCGGAUUCCCG | 1538 | GGAAUCCGGUACUCGGCCGCG | 61.2 | 61.2 |
| 99 | 295 | GGCCGAGUACCGGAUUCCCGA | 1539 | GGGAAUCCGGUACUCGGCCGC | 58.7 | 58.7 |
| 100 | 296 | GCCGAGUACCGGAUUCCCGAG | 1540 | CGGGAAUCCGGUACUCGGCCG | 64.7 | 63.7 |
| 101 | 297 | CCGAGUACCGGAUUCCCGAGU | 1541 | UCGGGAAUCCGGUACUCGGCC | 76.4 | 75.4 |
| 102 | 298 | CGAGUACCGGAUUCCCGAGUU | 1542 | CUCGGGAAUCCGGUACUCGGC | 68.9 | 67.9 |
| 103 | 299 | GAGUACCGGAUUCCCGAGUUU | 1543 | ACUCGGGAAUCCGGUACUCGG | 73.7 | 72.7 |
| 104 | 300 | AGUACCGGAUUCCCGAGUUUG | 1544 | AACUCGGGAAUCCGGUACUCG | 77.4 | 76.4 |
| 105 | 301 | GUACCGGAUUCCCGAGUUUGG | 1545 | AAACUCGGGAAUCCGGUACUC | 79.3 | 78.3 |
| 106 | 302 | UACCGGAUUCCCGAGUUUGGG | 1546 | CAAACUCGGGAAUCCGGUACU | 59.4 | 58.4 |
| 107 | 303 | ACCGGAUUCCCGAGUUUGGGA | 1547 | CCAAACUCGGGAAUCCGGUAC | 59.9 | 58.9 |
| 108 | 304 | CCGGAUUCCCGAGUUUGGGAG | 1548 | CCCAAACUCGGGAAUCCGGUA | 60.9 | 59.9 |
| 109 | 305 | CGGAUUCCCGAGUUUGGGAGG | 1549 | UCCCAAACUCGGGAAUCCGGU | 30.2 | 79.2 |
| 110 | 306 | GGAUUCCCGAGUUUGGGAGGG | 1550 | GUCCCAAACUCGGGAAUCCGG | 68.1 | 67.1 |
| 111 | 307 | GAUUCCCGAGUUUGGGAGGCU | 1551 | CCUCCCAAACUCGGGAAUCCG | 59.3 | 58.3 |
| 112 | 308 | AUUCCCGAGUUUGGGAGGCUC | 1552 | GCCUCCCAAACUCGGGAAUCC | 33.2 | 32.2 |
| 113 | 309 | UUCCCGAGUUUGGGAGGCUCU | 1553 | AGCCUCCCAAACUCGGGAAUC | 47.8 | 46.8 |
| 114 | 310 | UCCCGAGUUUGGGAGGCUCUG | 1554 | GAGCCUCCCAAACUCGGGAAU | 54.2 | 53.2 |
| 115 | 311 | CCCGAGUUUGGGAGGCUCUGC | 1555 | AGAGCCUCCCAAACUCGGGAA | 72.3 | 71.3 |
| 116 | 312 | CCGAGUUUGGGAGGCUCUGCU | 1556 | CAGAGCCUCCCAAACUCGGGA | 68.3 | 67.3 |
| 117 | 313 | CGAGUUUGGGAGGCUCUGCUU | 1557 | GCAGAGCCUCCCAAACUCGGG | 64 | 63 |
| 118 | 314 | GAGUUUGGGAGGCUCUGCUUU | 1558 | AGCAGAGCCUCCCAAACUCGG | 72.8 | 71.8 |
| 119 | 315 | AGUUUGGGAGGCUCUGCUUUC | 1559 | AAGCAGAGCCUCCCAAACUCG | 7.58 | 74.8 |
| 120 | 316 | GUUUGGGAGGCUCUGCUUUCC | 1560 | AAAGCAGAGCCUCCCAAACUC | 69 | 68 |
| 121 | 317 | UUUGGGAGGCUCUGCUUUCCU | 1561 | GAAAGCAGAGCCUCCCAAACU | 49 | 48 |
| 122 | 318 | UUGGGAGGCUCUGCUUUCCUC | 1562 | GGAAAGCAGAGCCUCCCAAAC | 37.8 | 36.8 |
| 123 | 319 | UGGGAGGCUCUGCUUUCCUCC | 1563 | AGGAAAGCAGAGCCUCCCAAA | 61.1 | 60.1 |
| 124 | 320 | GGGAGGCUCUGCUUUCCUCCU | 1564 | GAGGAAAGCAGAGCCUCCCAA | 69 | 68 |
| 125 | 321 | GGAGGCUCUGCUUUCCUCCUU | 1565 | GGAGGAAAGCAGAGCCUCCCA | 59.2 | 58.2 |
| 126 | 322 | GAGGCUCUGCUUUCCUCCUUA | 1566 | AGGAGGAAAGCAGAGCCUCCC | 66.8 | 65.8 |
| 127 | 323 | AGGCUCUGCUUUCCUCCUUAG | 1567 | AAGGAGGAAAGCAGAGCCUCC | 66.5 | 65.5 |
| 128 | 324 | GGCUCUGCUUUCCUCCUUAGG | 1568 | UAAGGAGGAAAGCAGAGCCUC | 87.2 | 86.2 |
| 129 | 325 | GCUCUGCUUUCCUCCUUAGGA | 1569 | CUAAGGAGGAAAGCAGAGCCU | 75.7 | 74.7 |
| 130 | 326 | CUCUGCUUUCCUCCUUAGGAC | 1570 | CCUAAGGAGGAAAGCAGAGCC | 52.3 | 51.3 |
| 131 | 327 | UCUGCUUUCCUCCUUAGGACC | 1571 | UCCUAAGGAGGAAAGCAGAGC | 64.3 | 53.3 |
| 132 | 328 | CUGCUUUCCUCCUUAGGACCC | 1572 | GUCCUAAGGAGGAAAGCAGAG | 66.2 | 65.2 |
| 133 | 329 | UGCUUUCCUCCUUAGGACCCA | 1573 | GGUCCUAAGGAGGAAAGCAGA | 55.9 | 54.9 |
| 134 | 330 | GCUUUCCUCCUUAGGACCCAC | 1574 | GGGUCCUAAGGAGGAAAGCAG | 58.5 | 57.5 |
| 135 | 331 | CUUUCCUCCUUAGGACCCACU | 1575 | UGGGUCCUAAGGAGGAAAGCA | 68.6 | 67.6 |
| 136 | 332 | UUUCCUCCUUAGGACCCACUU | 1576 | GUGGGUCCUAAGGAGGAAAGC | 46 | 45 |
| 137 | 333 | UUCCUCCUUAGGACCCACUUU | 1577 | AGUGGGUCCUAAGGAGGAAAG | 53.8 | 52.8 |
| 138 | 334 | UCCUCCUUAGGACCCACUUUG | 1578 | AAGUGGGUCCUAAGGAGGAAA | 66.4 | 65.4 |
| 139 | 335 | CCUCCUUAGGACCCACUUUGC | 1579 | AAAGUGGGUCCUAAGGAGGAA | 79.9 | 78.9 |
| 140 | 336 | CUCCUUAGGACCCACUUUGCC | 1580 | CAAAGUGGGUCCUAAGGAGGA | 66 | 65 |
| 141 | 337 | UCCUUAGGACCCACUUUGCCG | 1581 | GCAAAGUGGGUCCUAAGGAGG | 55.6 | 54.6 |
| 142 | 338 | CCUUAGGACCCACUUUGCCGU | 1582 | GGCAAAGUGGGUCCUAAGGAG | 58.2 | 57.2 |
| 143 | 339 | CUUAGGACCCACUUUGCCGUC | 1583 | CGGCAAAGUGGGUCCUAAGGA | 55.8 | 54.8 |
| 144 | 340 | UAGGACCCACUUUGCCGUCCU | 1584 | ACGGCAAAGUGGGUCCUAAGG | 54.6 | 53.6 |
| 145 | 341 | UAGGACCCACUUUGCCGUCCU | 1585 | GACGGCAAAGUGGGUCCUAAG | 47.2 | 46.2 |
| 146 | 342 | AGGACCCACUUUGCCGUCCUG | 1586 | GGACGGCAAAGUGGGUCCUAA | 47.4 | 46.4 |
| 147 | 348 | GGACCCACUUUGCCGUCCUGG | 1587 | AGGACGGCAAAGUGGGUCCUA | 74.4 | 73.4 |
| 148 | 344 | GACCCACUUUGCCGUCCUGGG | 1588 | CAGGACGGCAAAGUGGGUCCU | 66.1 | 55.1 |
| 171 | 345 | GGCUGCAGUUAUGUCCGCGCU | 1589 | CGCGGACAUAACUGCAGCCAC | 58 | 57 |
| 172 | 346 | GCUGCAGUUAUGUCCGCGCUG | 1590 | GCGCGGACAUAACUGCAGCCA | 64.4 | 53.4 |
| 173 | 347 | CUGCAGUUAUGUCCGCGCUGC | 1591 | AGCGCGGACAUAACUGCAGCC | 67.3 | 66.3 |
| 174 | 348 | UGCAGUUAUGUCCGCGCUGCG | 1592 | CAGCGCGGACAUAACUGCAGC | 59.4 | 58.4 |
| 175 | 349 | GCAGUUAUGUCCGCGCUGCGA | 1593 | GCAGCGCGGACAUAACUGCAG | 66.9 | 65.9 |
| 176 | 350 | CAGUUAUGUCCGCGCUGCGAC | 1594 | CGCAGCGCGGACAUAACUGCA | 65.7 | 64.7 |
| 177 | 351 | AGUUAUGUCCGCGCUGCGACC | 1595 | UCGCAGCGCGGACAUAACUGC | 76.5 | 75.5 |
| 178 | 352 | GUUAUGUCCGCGCUGCGACCU | 1596 | GUCGCAGCGCGGACAUAACUG | 68.4 | 67.4 |
| 179 | 353 | UUAUGUCCGCGCUGCGACCUC | 1597 | GGUCGCAGCGCGGACAUAACU | 49.4 | 48.4 |
| 180 | 354 | UAUGUCCGCGCUGCGACCUCU | 1598 | AGGUCGCAGCGCGGACAUAAC | 49.2 | 48.2 |
| 181 | 355 | AUGUCCGCGCUGCGACCUCUC | 1599 | GAGGUCGCAGCGCGGACAUAA | 56.7 | 55.7 |
| 182 | 356 | UGUCCGCGCUGCGACCUCUCC | 1600 | AGAGGUCGCAGCGCGGACAUA | 70.6 | 69.6 |
| 183 | 357 | GUCCGCGCUGCGACCUCUCCU | 1601 | GAGAGGUCGCAGCGCGGACAU | 63.1 | 62.1 |
| 184 | 358 | UCCGCGCUGCGACCUCUCCUG | 1602 | GGAGAGGUCGCAGCGCGGACA | 50.6 | 49.6 |
| 185 | 359 | CCGCGCUGCGACCUCUCCUGC | 1603 | AGGAGAGGUCGCAGCGCGGAC | 65.3 | 64.3 |
| 186 | 360 | CGCGCUGCGACCUCUCCUGCU | 1604 | CAGGAGAGGUCGCAGCGCGGA | 72.8 | 71.8 |
| 187 | 361 | GCGCUGCGACCUCUCCUGCUU | 1605 | GCAGGAGAGGUCGCAGCGCGG | 67.1 | 66.1 |
| 188 | 362 | CGCUGCGACCUCUCCUGCUUC | 1806 | AGCAGGAGAGGUCGCAGCGCG | 76.1 | 75.1 |
| 189 | 363 | GCUGCGACCUCUCCUGCUUCU | 1607 | AAGCAGGAGAGGUCGCAGCGC | 83.4 | 82.4 |
| 190 | 364 | CUGCGACCUCUCCUGCUUCUG | 1608 | GAAGCAGGAGAGGUCGCAGCG | 66 | 65 |
| 191 | 365 | UGCGACCUCUCCUGCUUCUGC | 1609 | AGAAGCAGGAGAGGUCGCAGC | 65.8 | 64.8 |
| 192 | 366 | GCGACCUCUCCUGCUUCUGCU | 1610 | CAGAAGCAGGAGAGGUCGCAG | 71.4 | 70.4 |
| 193 | 367 | CGACCUCUCCUGCUUCUGCUG | 1611 | GCAGAAGCAGGAGAGGUCGCA | 65.7 | 64.7 |
| 194 | 368 | GACCUCUCCUGCUUCUGCUGC | 1612 | AGCAGAAGCAGGAGAGGUCGC | 69.2 | 68.2 |
| 195 | 369 | ACCUCUCCUGCUUCUGCUGCU | 1613 | CAGCAGAAGCAGGAGAGGUCG | 65.1 | 64.1 |
| 196 | 370 | CCUCUCCUGCUUCUGCUGCUG | 1614 | GCAGCAGAAGCAGGAGAGGUC | 51.7 | 50.7 |
| 197 | 371 | CUCUCCUGCUUCUGCUGCUGC | 1615 | AGCAGCAGAAGCAGGAGAGGU | 72.4 | 71.4 |
| 198 | 372 | UCUCCUGCUUCUGCUGCUGCC | 1616 | CAGCAGCAGAAGCAGGAGAGG | 62.2 | 61.2 |
| 199 | 373 | CUCCUGCUUCUGCUGCUGCCU | 1617 | GCAGCAGCAGAAGCAGGAGAG | 58.2 | 57.2 |
| 200 | 374 | UCCUGCUUCUGCUGCUGCCUC | 1618 | GGCAGCAGCAGAAGCAGGAGA | 53.3 | 51.3 |
| 201 | 375 | CCUGCUUCUGCUGCUGCCUCU | 1619 | AGGCAGCAGCAGAAGCAGGAG | 71.7 | 69.7 |
| 202 | 376 | CUGCUUCUGCUGCUGCCUCUG | 1620 | GAGGCAGCAGCAGAAGCAGGA | 61.5 | 59.5 |
| 203 | 377 | UGCUUCUGCUGCUGCCUCUGU | 1621 | AGAGGCAGCAGCAGAAGCAGG | 70 | 68 |
| 204 | 378 | GCUUCUGCUGCUGCCUCUGUG | 1622 | CAGAGGCAGCAGCAGAAGCAG | 70.9 | 68.9 |
| 205 | 379 | CUUCUGCUGCUGCCUCUGUGU | 1623 | ACAGAGGCAGCAGCAGAAGCA | 68.7 | 66.7 |
| 206 | 380 | UUCUGCUGCUGCCUCUGUGUC | 1624 | CACAGAGGCAGCAGCAGAAGC | 50.1 | 48.1 |
| 207 | 381 | UCUGCUGCUGCCUCUGUGUCC | 1625 | ACACAGAGGCAGCAGCAGAAG | 69.2 | 67.2 |
| 208 | 382 | CUGCUGCUGCCUCUGUGUCCC | 1626 | GACACAGAGGCAGCAGCAGAA | 63.6 | 61.6 |
| 209 | 383 | UGCUGCUGCCUCUGUGUCCCG | 1627 | GGACACAGAGGCAGCAGCAGA | 56.7 | 54.7 |
| 210 | 384 | GCUGCUGCCUCUGUGUCCCGG | 1628 | GGGACACAGAGGCAGCAGCAG | 63.9 | 61.9 |
| 211 | 385 | CUGCUGCCUCUGUGUCCCGGU | 1629 | CGGGACACAGAGGCAGCAGCA | 57 | 55 |
| 212 | 386 | UGCUGCCUCUGUGUCCCGGUC | 1630 | CCGGGACACAGAGGCAGCAGC | 44.9 | 42.9 |
| 213 | 387 | GCUGCCUCUGUGUCCCGGUCC | 1631 | ACCGGGACACAGAGGCAGCAG | 72.3 | 70.3 |
| 214 | 388 | CUGCCUCUGUGUCCCGGUCCU | 1632 | GACCGGGACACAGAGGCAGCA | 61.9 | 59.9 |
| 215 | 389 | UGCCUCUGUGUCCCGGUCCUG | 1633 | GGACCGGGACACAGAGGCAGC | 42.8 | 40.8 |
| 216 | 390 | GCCUCUGUGUCCCGGUCCUGG | 1834 | AGGACCGGGACACAGAGGCAG | 80.1 | 78.1 |
| 217 | 391 | CCUCUGUGUCCCGGUCCUGGU | 1635 | CAGGACCGGGACACAGAGGCA | 64.8 | 62.8 |
| 218 | 392 | CUCUGUGUCCCGGUCCUGGUC | 1636 | CCAGGACCGGGACACAGAGGC | 52.1 | 50.1 |
| 219 | 393 | UCUGUGUCCCGGUCCUGGUCC | 1637 | ACCAGGACCGGGACACAGAGG | 68.4 | 66.4 |
| 220 | 394 | CUGUGUCCCGGUCCUGGUCCC | 1638 | GACCAGGACCGGGACACAGAG | 64.9 | 62.9 |
| 221 | 395 | UGUGUCCCGGUCCUGGUCCCG | 1639 | GGACCAGGACCGGGACACAGA | 47.6 | 45.6 |
| 222 | 396 | GUGUCCCGGUCCUGGUCCCGG | 1640 | GGGACCAGGACCGGGACACAG | 58.5 | 56.5 |
| 223 | 397 | UGUCCCGGUCCUGGUCCCGGA | 1641 | CGGGACCAGGACCGGGACACA | 44.1 | 42.1 |
| 224 | 398 | GUCCCGGUCCUGGUCCCGGAC | 1642 | CCGGGACCAGGACCGGGACAC | 43.7 | 41.7 |
| 225 | 399 | UCCCGGUCCUGGUCCCGGACC | 1643 | UCCGGGACCAGGACCGGGACA | 66.8 | 64.8 |
| 226 | 400 | CCCGGUCCUGGUCCCGGACGC | 1644 | GUCCGGGACCAGGACCGGGAC | 55.5 | 53.5 |
| 227 | 401 | CCGGUCCUGGUCCCGGACCCG | 1645 | GGUCCGGGACCAGGACCGGGA | 52.4 | 50.4 |
| 228 | 402 | CGGUCCUGGUCCCGGACCCGG | 1646 | GGGUCCGGGACCAGGACCGGG | 62.9 | 60.9 |
| 229 | 403 | GGUCCUGGUCCCGGACCCGGG | 1647 | CGGGUCCGGGACCAGGACCGG | 63.3 | 61.3 |
| 230 | 404 | GUCCUGGUCCCGGACCCGGGA | 1648 | CCGGGUCCGGGACCAGGACCG | 52.1 | 50.1 |
| 231 | 405 | UCCUGGUCCCGGACCCGGGAG | 1649 | CCCGGGUCCGGGACCAGGACC | 39 | 37 |
| 232 | 406 | CCUGGUCCCGGACCCGGGAGC | 1650 | UCCCGGGUCCGGGACCAGGAC | 65.8 | 63.8 |
| 233 | 407 | CUGGUCCCGGACCCGGGAGCG | 1651 | CUCCCGGGUCCGGGACCAGGA | 51.2 | 49.2 |
| 234 | 408 | UGGUCCCGGACCGGGGAGCGA | 1652 | GCUCCCGGGUCCGGGACCAGG | 44.1 | 42.1 |
| 235 | 409 | GGUCCCGGACCCGGGAGCGAG | 1653 | CGCUCCCGGGUCCGGGACCAG | 53.4 | 51.4 |
| 236 | 410 | GUCCCGGACCCGGGAGCGAGG | 1654 | UCGCUCCCGGGUCCGGGACCA | 68.1 | 66.1 |
| 237 | 411 | UCCCGGACCCGGGAGCGAGGC | 1655 | CUCGCUCCCGGGUCCGGGACG | 42.9 | 40.9 |
| 238 | 412 | CGCGGACCGGGGAGCGAGGCA | 1656 | CCUCGCUCCGGGGUCCGGGAC | 52 | 50 |
| 239 | 413 | CCGGACCCGGGAGCGAGGCAA | 1657 | GCCUCGCUCCCGGGUCCGGGA | 46.6 | 44.6 |
| 240 | 414 | CGGACCCGGGAGCGAGGCAAA | 1658 | UGCCUCGCUCCCGGGUCCGGG | 74.7 | 72.7 |
| 241 | 415 | GGACCCGGGAGCGAGGCAAAG | 1659 | UUGCCUCGCUCCCGGGUCCGG | 83.5 | 81.5 |
| 242 | 416 | GACCCGGGAGCGAGGCAAAGG | 1660 | UUUGCCUCGCUCCCGGGUCCG | 84.7 | 82.7 |
| 243 | 417 | ACCCGGGAGCGAGGCAAAGGU | 1661 | CUUUGCCUCGCUCCCGGGUCC | 51.8 | 49.8 |
| 244 | 418 | CCCGGGAGCGAGGCAAAGGUC | 1662 | CCUUUGCCUCGCUCCCGGGUC | 52.1 | 50.1 |
| 245 | 419 | CCGGGAGCGAGGCAAAGGUCA | 1663 | ACCUUUGCCUCGCUCCCGGGU | 73.1 | 71.1 |
| 246 | 420 | CGGGAGCGAGGCAAAGGUCAC | 1664 | GACCUUUGCCUCGCUCCCGGG | 71.1 | 69.1 |
| 247 | 421 | GGGAGCGAGGCAAAGGUCACC | 1665 | UGACCUUUGCCUCGCUCCCGG | 86.2 | 84.2 |
| 248 | 422 | GGAGCGAGGCAAAGGUCACCC | 1666 | GUGACCUUUGCCUCGCUCCCG | 78.9 | 76.9 |
| 249 | 423 | GAGCGAGGCAAAGGUCACCCG | 1667 | GGUGACCUUUGCCUCGCUCCC | 54.4 | 52.4 |
| 250 | 424 | AGCGAGGCAAAGGUCACCCGG | 1668 | GGGUGACCUUUGCCUCGCUCC | 46.1 | 44.1 |
| 251 | 425 | GCGAGGCAAAGGUCACCCGGA | 1669 | CGGGUGACCUUUGCCUCGCUC | 62.4 | 60.4 |
| 252 | 426 | CGAGGCAAAGGUCACCCGGAG | 1670 | CCGGGUGACCUUUGCCUCGCU | 63.5 | 61.5 |
| 253 | 427 | GAGGCAAAGGUCACGCGGAGU | 1671 | UCCGGGUGACCUUUGCCUCGC | 73.7 | 71.7 |
| 254 | 428 | AGGCAAAGGUCACCCGGAGUU | 1672 | CUCCGGGUGACCUUUGCCUCG | 66.8 | 64.8 |
| 255 | 429 | GGCAAAGGUCACCCGGAGUUG | 1673 | ACUCCGGGUGACCUUUGCCUC | 72.3 | 70.3 |
| 256 | 430 | GCAAAGGUCACCCGGAGUUGU | 1674 | AACUCCGGGUGACCUUUGCCU | 78.7 | 76.7 |
| 257 | 431 | CAAAGGUCACCCGGAGUUGUG | 1675 | CAACUCCGGGUGACCUUUGCC | 61.8 | 59.8 |
| 258 | 432 | AAAGGUCACCCGGAGUUGUGC | 1676 | ACAACUCCGGGUGACCUUUGC | 66.6 | 64.6 |
| 259 | 433 | AAGGUCACCCGGAGUUGUGCA | 1677 | CACAACUCCGGGUGACCUUUG | 66.7 | 64.7 |
| 260 | 434 | AGGUCACCCGGAGUUGUGCAG | 1678 | GCACAACUCCGGGUGACCUUU | 61 | 59 |
| 261 | 435 | GGUCACCCGGAGUUGUGCAGA | 1679 | UGCACAACUCCGGGUGACCUU | 84.8 | 82.8 |
| 262 | 436 | GUCACCCGGAGUUGUGCAGAG | 1680 | CUGCACAACUCCGGGUGACCU | 64.1 | 62.1 |
| 263 | 437 | UCACCCGGAGUUGUGCAGAGA | 1681 | UCUGCACAACUCCGGGUGACC | 58.4 | 56.4 |
| 264 | 438 | CACCCGGAGUUGUGCAGAGAC | 1682 | CUCUGCACAACUCCGGGUGAC | 68 | 66 |
| 265 | 439 | ACCGGGAGUUGUGCAGAGACC | 1683 | UCUCUGCACAACUCCGGGUGA | 82.6 | 80.6 |
| 266 | 440 | CCCGGAGUUGUGCAGAGACCC | 1684 | GUCUCUGCACAACUCCGGGUG | 76.4 | 74.4 |
| 267 | 441 | CCGGAGUUGUGCAGAGACCCG | 1685 | GGUCUCUGCACAACUCCGGGU | 74.4 | 72.4 |
| 268 | 442 | CGGAGUUGUGCAGAGACCCGG | 1686 | GGGUCUCUGCACAACUCCGGG | 71.9 | 69.9 |
| 269 | 443 | GGAGUUGUGCAGAGACCCGGC | 1687 | CGGGUCUCUGCACAACUCCGG | 78 | 76 |
| 270 | 444 | GAGUUGUGCAGAGACCCGGCA | 1688 | CCGGGUCUCUGCACAACUCCG | 68.1 | 66.1 |
| 271 | 445 | AGUUGUGCAGAGACCCGGCAG | 1689 | GCCGGGUCUCUGCACAACUCC | 56.7 | 54.7 |
| 272 | 446 | GUUGUGCAGAGACCCGGCAGG | 1690 | UGCCGGGUCUCUGCACAACUC | 74.1 | 72.1 |
| 273 | 447 | UUGUGCAGAGACCCGGCAGGU | 1691 | CUGCCGGGUCUCUGCACAACU | 52.6 | 50.6 |
| 274 | 448 | UGUGCAGAGACCCGGCAGGUG | 1692 | CCUGCCGGGUCUCUGCACAAC | 51 | 49 |
| 275 | 449 | GUGCAGAGACCCGGCAGGUGC | 1693 | ACCUGCCGGGUCUCUGCACAA | 66.8 | 64.8 |
| 276 | 450 | UGCAGAGACCCGGCAGGUGCU | 1694 | CACCUGCCGGGUCUCUGCACA | 54.8 | 52.8 |
| 277 | 451 | GCAGAGACCCGGCAGGUGCUG | 1695 | GCACCUGCCGGGUCUCUGCAC | 60 | 58 |
| 278 | 452 | CAGAGACCCGGCAGGUGCUGG | 1696 | AGCACCUGCCGGGUCUCUGCA | 71.4 | 69.4 |
| 279 | 453 | AGAGACCCGGCAGGUGCUGGG | 1697 | CAGCACCUGCCGGGUCUCUGC | 53.8 | 51.8 |
| 306 | 454 | GGGAUAUAGCUUAAACCUAAU | 1698 | UAGGUUUAAGCUAUAUCCCCG | 94.2 | 91.2 |
| 307 | 455 | GGAUAUAGCUUAAACCUAAUC | 1699 | UUAGGUUUAAGCUAUAUCCCC | 94.4 | 91.4 |
| 308 | 456 | GAUAUAGCUUAAACCUAAUCC | 1700 | AUUAGGUUUAAGCUAUAUCCC | 82.2 | 79.2 |
| 309 | 457 | AUAUAGCUUAAACCUAAUCCC | 1701 | GAUUAGGUUUAAGCUAUAUCC | 53.4 | 50.4 |
| 310 | 458 | UAUAGCUUAAACCUAAUCCCU | 1702 | GGAUUAGGUUUAAGCUAUAUC | 44.1 | 41.1 |
| 311 | 459 | AUAGCUUAAACCUAAUCCCUC | 1703 | GGGAUUAGGUUUAAGCUAUAU | 55.9 | 52.9 |
| 312 | 460 | UAGCUUAAACCUAAUCCCUCC | 1704 | AGGGAUUAGGUUUAAGCUAUA | 66.1 | 63.1 |
| 313 | 461 | AGCUUAAACCUAAUCCCUCCC | 1705 | GAGGGAUUAGGUUUAAGCUAU | 63.2 | 60.2 |
| 314 | 462 | GCUUAAACCUAAUCCCUCCCG | 1706 | GGAGGGAUUAGGUUUAAGCUA | 68.5 | 65.5 |
| 315 | 463 | CUUAAACCUAAUCCCUCCCGC | 1707 | GGGAGGGAUUAGGUUUAAGCU | 50.4 | 47.4 |
| 316 | 464 | UUAAACCUAAUCCCUCCCGCC | 1708 | CGGGAGGGAUUAGGUUUAAGC | 32.3 | 29.3 |
| 317 | 465 | UAAACCUAAUCCCUCCCGCCC | 1709 | GCGGGAGGGAUUAGGUUUAAG | 43.3 | 40.3 |
| 318 | 466 | AAACCUAAUCCCUCCCGCCCU | 1710 | GGCGGGAGGGAUUAGGUUUAA | 46.4 | 43.4 |
| 319 | 467 | AACCUAAUCCCUCCCGCCCUG | 1711 | GGGCGGGAGGGAUUAGGUUUA | 45.2 | 42.2 |
| 320 | 468 | ACCUAAUCCCUCCCGCCCUGA | 1712 | AGGGCGGGAGGGAUUAGGUUU | 60.8 | 57.8 |
| 321 | 469 | CCUAAUCCCUCCCGCCCUGAU | 1713 | CAGGGCGGGAGGGAUUAGGUU | 61.7 | 58.7 |
| 322 | 470 | CUAAUCCCUCCCGCCCUGAUC | 1714 | UCAGGGCGGGAGGGAUUAGGU | 60 | 57 |
| 323 | 471 | UAAUCCCUCCCGCCCUGAUCU | 1715 | AUCAGGGCGGGAGGGAUUAGG | 58.8 | 55.8 |
| 324 | 472 | AAUCCCUCCCGCCCUGAUCUC | 1716 | GAUCAGGGCGGGAGGGAUUAG | 50.2 | 47.2 |
| 325 | 473 | AUCCCUCCCGCCCUGAUCUCA | 1717 | AGAUCAGGGCGGGAGGGAUUA | 53.3 | 50.3 |
| 326 | 474 | UCCCUCCCGCCCUGAUCUCAG | 1718 | GAGAUCAGGGCGGGAGGGAUU | 45.6 | 42.6 |
| 327 | 475 | CCCUCCCGCCCUGAUCUCAGG | 1719 | UGAGAUCAGGGCGGGAGGGAU | 66.5 | 63.5 |
| 328 | 476 | CCUCCCGCCCUGAUCUCAGGU | 1720 | CUGAGAUCAGGGCGGGAGGGA | 60.3 | 57.3 |
| 329 | 477 | CUCCCGCCCUGAUCUCAGGUG | 1721 | CCUGAGAUCAGGGCGGGAGGG | 58.5 | 55.5 |
| 330 | 478 | UCCCGCCCUGAUCUCAGGUGA | 1722 | ACCUGAGAUCAGGGCGGGAGG | 52.3 | 49.3 |
| 331 | 479 | CCCGCCCUGAUCUCAGGUGAG | 1723 | CACCUGAGAUCAGGGCGGGAG | 56.8 | 53.8 |
| 332 | 480 | CCGCCCUGAUCUCAGGUGAGC | 1724 | UCACCUGAGAUCAGGGCGGGA | 79.4 | 76.4 |
| 333 | 481 | CGCCCUGAUCUCAGGUGAGCA | 1725 | CUCACCUGAGAUCAGGGCGGG | 71.1 | 65.1 |
| 334 | 482 | GCCCUGAUCUCAGGUGAGCAC | 1726 | GCUCACCUGAGAUCAGGGCGG | 61.6 | 58.6 |
| 335 | 483 | CCCUGAUCUCAGGUGAGCACC | 1727 | UGCUCACCUGAGAUCAGGGCG | 76.1 | 73.1 |
| 336 | 484 | CCUGAUCUCAGGUGAGCACCU | 1728 | GUGCUCACCUGAGAUCAGGGC | 64.3 | 61.3 |
| 337 | 485 | CUGAUCUCAGGUGAGCACCUC | 1729 | GGUGCUCACCUGAGAUCAGGG | 53.9 | 50.9 |
| 338 | 486 | UGAUCUCAGGUGAGCACCUCC | 1730 | AGGUGCUCACCUGAGAUCAGG | 70.7 | 67.7 |
| 339 | 487 | GAUCUCAGGUGAGCACCUCCG | 1731 | GAGGUGCUCACCUGAGAUCAG | 66.3 | 63.3 |
| 340 | 488 | AUCUCAGGUGAGCACCUCCGG | 1732 | GGAGGUGCUCACCUGAGAUCA | 52.6 | 49.6 |
| 341 | 489 | UCUCAGGUGAGCACCUCCGGG | 1733 | CGGAGGUGCUCACCUGAGAUC | 49.8 | 46.8 |
| 342 | 490 | CUCAGGUGAGCACCUCCGGGU | 1734 | CCGGAGGUGCUCACCUGAGAU | 59.5 | 56.5 |
| 343 | 491 | UCAGGUGAGCACCUCCGGGUC | 1735 | CCCGGAGGUGCUCACCUGAGA | 49.4 | 46.4 |
| 344 | 492 | CAGGUGAGCACCUCCGGGUCU | 1736 | ACCCGGAGGUGCUCACCUGAG | 67.3 | 64.3 |
| 345 | 493 | AGGUGAGCACCUCCGGGUCUG | 1737 | GACCCGGAGGUGCUCACCUGA | 62.4 | 59.4 |
| 346 | 494 | GGUGAGCACCUCCGGGUCUGU | 1738 | AGACCCGGAGGUGCUCACCUG | 77.1 | 74.1 |
| 347 | 495 | GUGAGCACCUCCGGGUCUGUC | 1739 | CAGACCCGGAGGUGCUCACCU | 57.5 | 54.5 |
| 348 | 496 | UGAGCACCUCCGGGUCUGUCC | 1740 | ACAGACCCGGAGGUGCUCACC | 54.7 | 51.7 |
| 349 | 497 | GAGCACCUCCGGGUCUGUCCC | 1741 | GACAGACCCGGAGGUGCUCAC | 51.7 | 48.7 |
| 368 | 498 | CCCAGGAGUACACCUGCUGUU | 1742 | CAGCAGGUGUACUCCUGGGGA | 69 | 66 |
| 369 | 499 | CCAGGAGUACACCUGCUGUUC | 1743 | ACAGCAGGUGUACUCCUGGGG | 80.8 | 77.8 |
| 370 | 500 | CAGGAGUACACCUGCUGUUCC | 1744 | AACAGCAGGUGUACUCCUGGG | 87.6 | 84.6 |
| 371 | 501 | AGGAGUACACCUGCUGUUCCA | 1745 | GAACAGCAGGUGUACUCCUGG | 71.7 | 68.7 |
| 372 | 502 | GGAGUACACCUGCUGUUCCAG | 1746 | GGAACAGCAGGUGUACUCCUG | 74.3 | 71.3 |
| 373 | 503 | GAGUACACCUGCUGUUCCAGU | 1747 | UGGAACAGCAGGUGUACUCCU | 87.7 | 84.7 |
| 374 | 504 | AGUACACCUGCUGUUCCAGUG | 1748 | CUGGAACAGCAGGUGUACUCC | 59.9 | 56.9 |
| 375 | 505 | GUACACCUGCUGUUCCAGUGA | 1749 | ACUGGAACAGCAGGUGUACUC | 67.8 | 64.8 |
| 376 | 506 | UACACCUGCUGUUCCAGUGAG | 1750 | CACUGGAACAGCAGGUGUACU | 80.5 | 57.5 |
| 377 | 507 | ACACCUGCUGUUCCAGUGAGA | 1751 | UCACUGGAACAGCAGGUGUAC | 75.8 | 72.8 |
| 378 | 508 | CACCUGCUGUUCCAGUGAGAC | 1752 | CUCACUGGAACAGCAGGUGUA | 75.7 | 72.7 |
| 379 | 509 | ACCUGCUGUUCCAGUGAGACA | 1753 | UCUCACUGGAACAGCAGGUGU | 84.6 | 81.6 |
| 380 | 510 | CCUGCUGUUCCAGUGAGACAG | 1754 | GUCUCACUGGAACAGCAGGUG | 72.2 | 69.2 |
| 381 | 511 | CUGCUGUUCCAGUGAGACAGA | 1755 | UGUCUCACUGGAACAGCAGGU | 87.7 | 84.7 |
| 382 | 512 | UGCUGUUCCAGUGAGACAGAG | 1756 | CUGUCUCACUGGAACAGCAGG | 71.6 | 68.6 |
| 383 | 513 | GCUGUUCCAGUGAGACAGAGC | 1757 | UCUGUCUCACUGGAACAGCAG | 93.3 | 90.3 |
| 384 | 514 | CUGUUCCAGUGAGACAGAGCA | 1758 | CUCUGUCUCACUGGAACAGCA | 67.6 | 64.6 |
| 385 | 515 | UGUUCCAGUGAGACAGAGCAG | 1759 | GCUCUGUCUCACUGGAACAGC | 56 | 53 |
| 386 | 516 | GUUCCAGUGAGACAGAGCAGA | 1760 | UGCUCUGUCUCACUGGAACAG | 86.6 | 83.6 |
| 387 | 517 | UUCCAGUGAGACAGAGCAGAG | 1761 | CUGCUCUGUCUCACUGGAACA | 59.5 | 56.5 |
| 388 | 518 | UCCAGUGAGACAGAGCAGAGG | 1762 | UCUGCUCUGUCUCACUGGAAC | 68.1 | 65.1 |
| 389 | 519 | CCAGUGAGACAGAGCAGAGGC | 1763 | CUCUGCUCUGUCUCACUGGAA | 76.1 | 73.1 |
| 390 | 520 | CAGUGAGACAGAGCAGAGGCU | 1764 | CCUCUGCUCUGUCUCACUGGA | 68.6 | 65.6 |
| 391 | 521 | AGUGAGACAGAGCAGAGGCUG | 1765 | GCCUCUGCUCUGUCUCACUGG | 66.3 | 63.3 |
| 392 | 522 | GUGAGACAGAGCAGAGGCUGA | 1766 | AGCCUCUGCUCUGUCUCACUG | 76.9 | 73.9 |
| 393 | 523 | UGAGACAGAGCAGAGGCUGAU | 1767 | CAGCCUCUGCUCUGUCUCACU | 57.3 | 54.3 |
| 394 | 524 | GAGACAGAGCAGAGGCUGAUC | 1768 | UCAGCCUCUGCUCUGUCUCAC | 82.3 | 79.3 |
| 395 | 525 | AGACAGAGCAGAGGCUGAUCA | 1769 | AUCAGCCUCUGCUCUGUCUCA | 78.1 | 75.1 |
| 396 | 526 | GAGAGAGGAGAGGCUGAUCAG | 1770 | GAUCAGCCUCUGCUCUGUCUC | 63.4 | 60.4 |
| 397 | 527 | ACAGAGCAGAGGCUGAUCAGG | 1771 | UGAUCAGCCUCUGCUCUGUCU | 76.2 | 73.2 |
| 398 | 528 | CAGAGCAGAGGCUGAUCAGGG | 1772 | CUGAUCAGCCUCUGCUCUGUC | 67.3 | 64.3 |
| 399 | 529 | AGAGCAGAGGCUGAUCAGGGA | 1773 | CCUGAUCAGCCUCUGCUCUGU | 63.1 | 60.1 |
| 400 | 530 | GAGCAGAGGCUGAUCAGGGAG | 1774 | CCCUGAUCAGCCUCUGCUCUG | 63.2 | 59.2 |
| 401 | 531 | AGCAGAGGCUGAUCAGGGAGA | 1775 | UCCCUGAUCAGCCUCUGCUCU | 78.1 | 74.1 |
| 402 | 532 | GCAGAGGCUGAUCAGGGAGAC | 1776 | CUCCCUGAUCAGCCUCUGCUC | 64.2 | 60.2 |
| 403 | 533 | CAGAGGCUGAUCAGGGAGACU | 1777 | UCUCCCUGAUCAGCCUCUGCU | 76.1 | 72.1 |
| 404 | 534 | AGAGGCUGAUCAGGGAGACUG | 1778 | GUCUCCCUGAUCAGCCUCUGC | 57.2 | 53.2 |
| 405 | 538 | GAGGCUGAUCAGGGAGACUGA | 1779 | AGUCUCCCUGAUCAGCCUCUG | 75 | 71 |
| 406 | 536 | AGGCUGAUCAGGGAGACUGAG | 1780 | CAGUCUCCCUGAUCAGCCUCU | 61.4 | 57.4 |
| 407 | 537 | GGCUGAUCAGGGAGACUGAGG | 1781 | UCAGUCUCCCUGAUCAGCCUC | 85.3 | 81.3 |
| 408 | 538 | GCUGAUCAGGGAGACUGAGGC | 1782 | CUCAGUCUCCCUGAUCAGCCU | 68.8 | 64.8 |
| 409 | 539 | CUGAUCAGGGAGACUGAGGCC | 1783 | CCUCAGUCUCCCUGAUCAGCC | 47.5 | 43.5 |
| 410 | 540 | UGAUCAGGGAGACUGAGGCCA | 1784 | GCCUCAGUCUCCCUGAUCAGC | 45.1 | 41.1 |
| 411 | 541 | GAUCAGGGAGACUGAGGCCAC | 1785 | GGCCUCAGUCUCCCUGAUCAG | 57.9 | 53.9 |
| 430 | 542 | ACCUUCCGAGGCCUGGUGGAG | 1786 | CCACCAGGCCUCGGAAGGUGG | 51 | 47 |
| 431 | 543 | CCUUCCGAGGCCUGGUGGAGG | 1787 | UCCACCAGGCCUCGGAAGGUG | 76.9 | 72.9 |
| 432 | 544 | CUUCCGAGGCCUGGUGGAGGA | 1788 | CUCCACCAGGCCUCGGAAGGU | 57.9 | 53.9 |
| 433 | 545 | UUCCGAGGCCUGGUGGAGGAC | 1789 | CCUCCACCAGGCCUCGGAAGG | 41.3 | 37.3 |
| 434 | 546 | UCCGAGGCCUGGUGGAGGACA | 1790 | UCCUCCACCAGGCCUCGGAAG | 69.1 | 65.1 |
| 435 | 547 | CCGAGGCCUGGUGGAGGACAG | 1791 | GUCCUCCACCAGGCCUCGGAA | 58.7 | 54.7 |
| 436 | 548 | CGAGGCCUGGUGGAGGACAGC | 1792 | UGUCCUCCACCAGGCCUCGGA | 75.4 | 71.4 |
| 437 | 549 | GAGGCCUGGUGGAGGACAGCG | 1793 | CUGUCCUCCACCAGGCCUCGG | 70.8 | 66.8 |
| 438 | 550 | AGGCCUGGUGGAGGACAGCGG | 1794 | GCUGUCCUCCACCAGGCCUCG | 53.9 | 49.9 |
| 439 | 551 | GGCCUGGUGGAGGACAGCGGC | 1795 | CGCUGUCCUCCACCAGGCCUC | 55.2 | 51.2 |
| 440 | 552 | GCCUGGUGGAGGACAGCGGCU | 1796 | CCGCUGUCCUCCACCAGGCCU | 64.3 | 60.3 |
| 441 | 553 | CCUGGUGGAGGACAGCGGCUC | 1797 | GCCGCUGUCCUCCACCAGGCC | 53.3 | 49.3 |
| 442 | 554 | CUGGUGGAGGACAGCGGCUCC | 1798 | AGCCGCUGUCCUCCACCAGGC | 62 | 58 |
| 443 | 555 | UGGUGGAGGACAGCGGCUCCU | 1799 | GAGCCGCUGUCCUCCACCAGG | 58.5 | 54.5 |
| 444 | 556 | GGUGGAGGACAGCGGCUCCUU | 1800 | GGAGCCGCUGUCCUCCACCAG | 69.3 | 65.3 |
| 445 | 557 | GUGGAGGACAGCGGCUCCUUU | 1801 | AGGAGCCGCUGUCCUCCACCA | 65.8 | 61.8 |
| 446 | 558 | UGGAGGACAGCGGCUCCUUUC | 1802 | AAGGAGCCGCUGUCCUCCACC | 60.1 | 56.1 |
| 447 | 559 | GGAGGACAGCGGCUCCUUUCU | 1803 | AAAGGAGCCGCUGUCCUCCAC | 78.3 | 74.3 |
| 448 | 560 | GAGGACAGCGGCUCCUUUCUG | 1804 | GAAAGGAGCCGCUGUCCUCCA | 64.8 | 60.8 |
| 449 | 561 | AGGACAGCGGCUCCUUUCUGG | 1805 | AGAAAGGAGCCGCUGUCCUCC | 65.2 | 61.2 |
| 450 | 562 | GGACAGCGGCUCCUUUCUGGU | 1806 | CAGAAAGGAGCCGCUGUCCUC | 68.1 | 64.1 |
| 451 | 563 | GACAGCGGCUCCUUUCUGGUU | 1807 | CCAGAAAGGAGCCGCUGUCCU | 60 | 56 |
| 452 | 564 | ACAGCGGCUCCUUUCUGGUUC | 1808 | ACCAGAAAGGAGCCGCUGUCC | 59.5 | 55.5 |
| 453 | 565 | CAGCGGCUCCUUUCUGGUUCA | 1809 | AACCAGAAAGGAGCCGCUGUC | 73.3 | 69.3 |
| 454 | 566 | AGCGGCUCCUUUCUGGUUCAC | 1810 | GAACCAGAAAGGAGCCGCUGU | 64 | 60 |
| 455 | 567 | GCGGCUCCUUUCUGGUUCACA | 1811 | UGAACCAGAAAGGAGCCGCUG | 91.7 | 87.7 |
| 456 | 568 | CGGCUCCUUUCUGGUUCACAC | 1812 | GUGAACCAGAAAGGAGCCGCU | 65.8 | 61.8 |
| 457 | 569 | GGCUCCUUUCUGGUUCACACA | 1813 | UGUGAACCAGAAAGGAGCCGC | 74.9 | 70.9 |
| 458 | 570 | GCUCCUUUCUGGUUCACACAC | 1814 | GUGUGAACCAGAAAGGAGCCG | 77.6 | 73.6 |
| 511 | 571 | UUUCUGGAGAUGCUCUCAGUA | 1815 | CUGAGAGCAUCUCCAGAAAAA | 56 | 51 |
| 512 | 572 | UUCUGGAGAUGCUCUCAGUAG | 1816 | ACUGAGAGCAUCUCCAGAAAA | 69.8 | 64.8 |
| 513 | 573 | UCUGGAGAUGCUCUCAGUAGC | 1817 | UACUGAGAGCAUCUCCAGAAA | 80.1 | 75.1 |
| 514 | 574 | CUGGAGAUGCUCUCAGUAGCC | 1818 | CUACUGAGAGCAUCUCCAGAA | 73.2 | 65.2 |
| 515 | 575 | UGGAGAUGCUCUCAGUAGCCC | 1819 | GCUACUGAGAGCAUCUCCAGA | 68.1 | 63.1 |
| 516 | 576 | GGAGAUGCUCUCAGUAGCCCA | 1820 | GGCUACUGAGAGCAUCUCCAG | 70.2 | 65.2 |
| 517 | 577 | GAGAUGCUCUCAGUAGCCCAG | 1821 | GGGCUACUGAGAGCAUCUCCA | 58.2 | 53.2 |
| 518 | 578 | AGAUGCUCUCAGUAGCCCAGC | 1822 | UGGGCUACUGAGAGCAUCUCC | 74.7 | 69.7 |
| 519 | 579 | GAUGeUCUCAGUAGCCCAGCA | 1823 | CUGGGCUACUGAGAGCAUCUC | 67.4 | 62.4 |
| 520 | 580 | AUGCUCUCAGUAGCCCAGCAC | 1824 | GCUGGGCUACUGAGAGCAUCU | 42.6 | 37.6 |
| 521 | 581 | UGCUCUCAGUAGCCCAGCACU | 1825 | UGCUGGGCUACUGAGAGCAUC | 71.1 | 66.1 |
| 522 | 582 | GCUCUCAGUAGCCCAGCACUC | 1826 | GUGCUGGGCUACUGAGAGCAU | 65.2 | 60.2 |
| 523 | 583 | CUCUCAGUAGCCCAGCACUCU | 1827 | AGUGCUGGGCUACUGAGAGCA | 69.1 | 64.1 |
| 524 | 584 | UCUCAGUAGCCCAGCACUCUC | 1828 | GAGUGCUGGGCUACUGAGAGC | 53.9 | 48.9 |
| 525 | 585 | CUCAGUAGCCCAGCACUCUCU | 1829 | AGAGUGCUGGGCUACUGAGAG | 68.6 | 63.6 |
| 526 | 586 | UCAGUAGCCCAGCACUCUCUG | 1830 | GAGAGUGCUGGGCUACUGAGA | 60.6 | 55.6 |
| 527 | 587 | CAGUAGCCCAGCACUCUCUGA | 1831 | AGAGAGUGCUGGGCUACUGAG | 74 | 69 |
| 528 | 588 | AGUAGCCCAGCACUCUCUGAC | 1832 | CAGAGAGUGCUGGGCUACUGA | 62.6 | 57.6 |
| 529 | 589 | GUAGaCCAGCACUCUCUGACC | 1833 | UCAGAGAGUGCUGGGCUACUG | 77.9 | 72.9 |
| 530 | 590 | UAGCCCAGCACUCUCUGACCC | 1834 | GUCAGAGAGUGCUGGGCUACU | 47.4 | 42.4 |
| 531 | 591 | AGCCCAGCACUCUCUGACCCA | 1835 | GGUCAGAGAGUGCUGGGCUAC | 51.1 | 46.1 |
| 532 | 592 | GCCCAGCACUCUCUGACCCAG | 1836 | GGGUCAGAGAGUGCUGGGCUA | 59.9 | 54.9 |
| 533 | 593 | CeCAGCACUCUCUGACCCAGC | 1837 | UGGGUCAGAGAGUGCUGGGCU | 72.5 | 67.5 |
| 534 | 594 | CCAGCACUCUCUGACCCAGCU | 1838 | CUGGGUCAGAGAGUGCUGGGC | 63.9 | 58.9 |
| 535 | 595 | CAGCACUCUCUGACCCAGCUC | 1839 | GCUGGGUCAGAGAGUGCUGGG | 60.7 | 55.7 |
| 536 | 596 | AGCACUCUCUGACCCAGCUCU | 1840 | AGCUGGGUCAGAGAGUGCUGG | 75.2 | 70.2 |
| 537 | 597 | GCACUCUCUGACCCAGCUCUU | 1841 | GAGCUGGGUCAGAGAGUGCUG | 68.6 | 63.6 |
| 538 | 598 | CACUCUCUGACCCAGCUCUUC | 1842 | AGAGCUGGGUCAGAGAGUGCU | 71.8 | 66.8 |
| 539 | 599 | ACUCUCUGACCCAGCUCUUCU | 1843 | AAGAGCUGGGUCAGAGAGUGC | 68.7 | 63.7 |
| 540 | 600 | CUCUCUGACCCAGCUCUUCUC | 1844 | GAAGAGCUGGGUCAGAGAGUG | 64.2 | 59.2 |
| 541 | 601 | UCUCUGACCCAGCUCUUCUCC | 1845 | AGAAGAGCUGGGUCAGAGAGU | 64.9 | 59.9 |
| 542 | 602 | CUCUGACCCAGCUCUUCUCCC | 1846 | GAGAAGAGCUGGGUCAGAGAG | 66.2 | 61.2 |
| 543 | 603 | UCUGACCCAGCUCUUCUCCCA | 1847 | GGAGAAGAGCUGGGUCAGAGA | 45.5 | 40.5 |
| 544 | 604 | CUGACCCAGCUCUUCUCCCAC | 1848 | GGGAGAAGAGCUGGGUCAGAG | 51.4 | 46.4 |
| 545 | 605 | UGACCCAGCUCUUCUCCCACU | 1849 | UGGGAGAAGAGCUGGGUCAGA | 71.4 | 66.4 |
| 546 | 606 | GACCCAGCUCUUCUCCCACUC | 1850 | GUGGGAGAAGAGCUGGGUCAG | 65.7 | 60.7 |
| 547 | 607 | ACCCAGCUCUUCUCCCACUCC | 1851 | AGUGGGAGAAGAGCUGGGUCA | 65.4 | 60.4 |
| 548 | 608 | CCCAGCUCUUCUCCCACUCCU | 1852 | GAGUGGGAGAAGAGCUGGGUC | 59.1 | 54.1 |
| 549 | 609 | CCAGCUCUUCUCCCACUCCUA | 1853 | GGAGUGGGAGAAGAGCUGGGU | 61.4 | 56.4 |
| 550 | 610 | CAGCUCUUCUCCCACUCCUAC | 1854 | AGGAGUGGGAGAAGAGCUGGG | 75.9 | 70.9 |
| 551 | 611 | AGCUCUUCUCCCACUCCUACG | 1855 | UAGGAGUGGGAGAAGAGCUGG | 90.4 | 85.4 |
| 552 | 612 | GCUCUUCUCCCACUCCUACGG | 1856 | GUAGGAGUGGGAGAAGAGCUG | 73 | 68 |
| 553 | 613 | CUCUUCUCCCACUCCUACGGC | 1857 | CGUAGGAGUGGGAGAAGAGCU | 57 | 52 |
| 554 | 614 | UCUUCUCCCACUCCUACGGCC | 1858 | CCGUAGGAGUGGGAGAAGAGC | 47.7 | 42.7 |
| 555 | 615 | CUUCUCCCACUCCUACGGCCG | 1859 | GCCGUAGGAGUGGGAGAAGAG | 45.1 | 43.1 |
| 556 | 616 | UUCUCCCACUCCUACGGCCGC | 1860 | GGCCGUAGGAGUGGGAGAAGA | 41 | 36 |
| 557 | 617 | UCUCCCACUCCUACGGCCGCC | 1861 | CGGCCGUAGGAGUGGGAGAAG | 46.2 | 41.2 |
| 558 | 618 | CUCCCACUCCUACGGCCGCCU | 1862 | GCGGCCGUAGGAGUGGGAGAA | 49.9 | 44.9 |
| 559 | 619 | UCCCACUCCUACGGCCGCCUG | 1863 | GGCGGCCGUAGGAGUGGGAGA | 36.1 | 31.1 |
| 560 | 620 | CCCACUCCUACGGCCGCCUGU | 1864 | AGGCGGCCGUAGGAGUGGGAG | 59.3 | 54.3 |
| 561 | 621 | CCACUCCUACGGCCGCCUGUA | 1865 | CAGGCGGCCGUAGGAGUGGGA | 58.7 | 53.7 |
| 562 | 622 | CACUCCUACGGCCGCCUGUAU | 1866 | ACAGGCGGCCGUAGGAGUGGG | 68.9 | 63.9 |
| 563 | 623 | ACUCCUACGGCCGCCUGUAUG | 1867 | UACAGGCGGCCGUAGGAGUGG | 75.5 | 70.5 |
| 564 | 624 | CUCCUACGGCCGCCUGUAUGC | 1868 | AUACAGGCGGCCGUAGGAGUG | 74.2 | 69.2 |
| 565 | 625 | UCCUACGGCCGCCUGUAUGCC | 1869 | CAUACAGGCGGCCGUAGGAGU | 51.9 | 46.9 |
| 566 | 626 | CCUACGGCCGCCUGUAUGCCC | 1870 | GCAUACAGGCGGCCGUAGGAG | 58.8 | 53.8 |
| 567 | 627 | CUACGGCCGCCUGUAUGCCCA | 1871 | GGCAUACAGGCGGCCGUAGGA | 46.7 | 41.7 |
| 568 | 628 | UACGGCCGCCUGUAUGCCCAG | 1872 | GGGCAUACAGGCGGCCGUAGG | 40.1 | 35.1 |
| 569 | 629 | ACGGCCGCCUGUAUGCCCAGC | 1873 | UGGGCAUACAGGCGGCCGUAG | 64.8 | 59.8 |
| 570 | 630 | CGGCCGCCUGUAUGCCCAGCA | 1874 | CUGGGCAUACAGGCGGCCGUA | 63.9 | 58.9 |
| 571 | 631 | GGCCGCCUGUAUGCCCAGCAC | 1875 | GCUGGGCAUACAGGCGGCCGU | 52.4 | 47.4 |
| 572 | 632 | GCCGCCUGUAUGCCCAGCACG | 1876 | UGCUGGGCAUACAGGCGGCCG | 69 | 64 |
| 573 | 633 | CCGCCUGUAUGCCCAGCACGC | 1877 | GUGCUGGGCAUACAGGCGGCC | 58.6 | 53.6 |
| 574 | 634 | CGCCUGUAUGCCCAGCACGCC | 1878 | CGUGCUGGGCAUACAGGCGGC | 57.2 | 52.2 |
| 575 | 635 | GCCUGUAUGCCCAGCACGCCC | 1879 | GCGUGCUGGGCAUACAGGCGG | 63.6 | 58.6 |
| 576 | 636 | CCUGUAUGCCCAGCACGCCCU | 1880 | GGCGUGCUGGGCAUACAGGCG | 51.2 | 46.2 |
| 577 | 637 | CUGUAUGCCCAGCACGCCCUC | 1881 | GGGCGUGCUGGGCAUACAGGC | 47.4 | 42.4 |
| 578 | 638 | UGUAUGCCCAGCACGCCCUCA | 1882 | AGGGCGUGCUGGGCAUACAGG | 58.9 | 53.9 |
| 579 | 639 | GUAUGCCCAGCACGCCCUCAU | 1883 | GAGGGCGUGCUGGGCAUACAG | 54.8 | 49.8 |
| 580 | 640 | UAUGCCCAGCACGCCCUCAUA | 1884 | UGAGGGCGUGCUGGGCAUACA | 53.9 | 48.9 |
| 581 | 641 | AUGCCCAGCACGCCCUCAUAU | 1885 | AUGAGGGCGUGCUGGGCAUAC | 54 | 49 |
| 582 | 642 | UGCCCAGCACGCCCUCAUAUU | 1886 | UAUGAGGGCGUGCUGGGCAUA | 74.3 | 69.3 |
| 583 | 643 | GCCCAGCACGCCCUCAUAUUC | 1887 | AUAUGAGGGCGUGCUGGGCAU | 72.6 | 67.6 |
| 584 | 644 | CCCAGCACGCCCUCAUAUUCA | 1888 | AAUAUGAGGGCGUGCUGGGCA | 70.8 | 65.8 |
| 585 | 645 | CCAGCACGCCCUCAUAUUCAA | 1889 | GAAUAUGAGGGCGUGCUGGGC | 61.5 | 56.5 |
| 586 | 646 | CAGCACGCCCUCAUAUUCAAU | 1890 | UGAAUAUGAGGGCGUGCUGGG | 77.4 | 72.4 |
| 587 | 647 | AGCACGCCCUCAUAUUCAAUG | 1891 | UUGAAUAUGAGGGCGUGCUGG | 91.7 | 86.7 |
| 588 | 648 | GCACGCCCUCAUAUUCAAUGG | 1892 | AUUGAAUAUGAGGGCGUGCUG | 81.4 | 76.4 |
| 607 | 649 | GGCCUGUUCUCUCGGCUGCGA | 1893 | GCAGCCGAGAGAACAGGCCAU | 66.3 | 60.3 |
| 608 | 650 | GCCUGUUCUCUCGGCUGCGAG | 1894 | CGCAGCCGAGAGAACAGGCCA | 61.2 | 55.2 |
| 609 | 651 | CCUGUUCUCUCGGCUGCGAGA | 1895 | UCGCAGCCGAGAGAACAGGCC | 74.9 | 68.9 |
| 610 | 652 | CUGUUCUCUCGGCUGCGAGAC | 1896 | CUCGCAGCCGAGAGAACAGGC | 59.5 | 53.5 |
| 611 | 653 | UGUUCUCUCGGCUGCGAGACU | 1897 | UCUCGCAGCCGAGAGAACAGG | 12.9 | 76.9 |
| 612 | 654 | GUUCUCUCGGCUGCGAGACUU | 1898 | GUCUCGCAGCCGAGAGAACAG | 61.6 | 55.6 |
| 613 | 655 | UUCUCUCGGCUGCGAGACUUC | 1899 | AGUCUCGCAGCCGAGAGAACA | 60.5 | 54.5 |
| 614 | 656 | UCUCUCGGCUGCGAGACUUCU | 1900 | AAGUCUCGCAGCCGAGAGAAC | 61.9 | 55.9 |
| 615 | 657 | CUCUCGGCUGCGAGACUUCUA | 1901 | GAAGUCUCGCAGCCGAGAGAA | 67.9 | 61.9 |
| 616 | 658 | UCUCGGCUGCGAGACUUCUAU | 1902 | AGAAGUCUCGCAGCCGAGAGA | 69.2 | 63.2 |
| 617 | 659 | CUCGGCUGCGAGACUUCUAUG | 1903 | UAGAAGUCUCGCAGCCGAGAG | 88.9 | 82.9 |
| 618 | 660 | UCGGCUGCGAGACUUCUAUGG | 1904 | AUAGAAGUCUCGCAGCCGAGA | 76.5 | 70.5 |
| 619 | 661 | CGGCUCCGAGACUUCUAUGGG | 1905 | CAUAGAAGUCUCGCAGCCGAG | 79.7 | 73.7 |
| 669 | 662 | GGCGGAUUUCUGGGCACAGCU | 1906 | CUGUGCCCAGAAAUCCGCCAG | 69 | 63 |
| 670 | 663 | GCGGAUUUCUGGGCACAGCUC | 1007 | GCUGUGCCCAGAAAUCCGCCA | 60 | 54 |
| 671 | 664 | CGGAUUUCUGGGCACAGCUCC | 1908 | AGCUGUGCCCAGAAAUCCGCC | 66.1 | 60.1 |
| 672 | 665 | GGAUUUCUGGGCACAGCUCCU | 1909 | GAGCUGUGCCCAGAAAUCCGC | 64.6 | 58.6 |
| 673 | 666 | GAUUUCUGGGCACAGCUCCUG | 1910 | GGAGCUGUGCCCAGAAAUCCG | 57.3 | 51.3 |
| 674 | 667 | AUUUCUGGGCACAGCUCCUGG | 1911 | AGGAGCUGUGCCCAGAAAUCC | 56 | 50 |
| 675 | 668 | UUUCUGGGCACAGCUCCUGGA | 1912 | CAGGAGCUGUGCCCAGAAAUC | 40.1 | 34.1 |
| 676 | 669 | UUCUGGGCACAGCUCCUGGAG | 1913 | CCAGGAGCUGUGCCCAGAAAU | 45.7 | 39.7 |
| 677 | 670 | UCUGGGCACAGCUCCUGGAGA | 1914 | UCCAGGAGCUGUGCCCAGAAA | 67.2 | 61.2 |
| 678 | 671 | CUGGGCACAGCUCCUGGAGAG | 1915 | CUCCAGGAGCUGUGCCCAGAA | 56.6 | 50.6 |
| 679 | 672 | UGGGCACAGCUCCUGGAGAGA | 1916 | UCUCCAGGAGCUGUGCCCAGA | 70.5 | 64.5 |
| 680 | 673 | GGGCACAGCUCCUGGAGAGAG | 1917 | CUCUCCAGGAGCUGUGCCCAG | 71 | 65 |
| 681 | 674 | GGCACAGCUCCUGGAGAGAGU | 1918 | UCUCUCCAGGAGCUGUGCCCA | 81.7 | 75.7 |
| 682 | 675 | GCACAGCUCCUGGAGAGAGUG | 1919 | CUCUCUCCAGGAGCUGUGCCC | 62.6 | 56.6 |
| 683 | 676 | CACAGCUCCUGGAGAGAGUGU | 1920 | ACUCUCUCCAGGAGCUGUGCC | 69.9 | 63.9 |
| 684 | 677 | ACAGCUCCUGGAGAGAGUGUU | 1921 | CACUCUCUCCAGGAGCUGUGC | 59.9 | 53.9 |
| 685 | 678 | CAGCUCCUGGAGAGAGUGUUC | 1922 | ACACUCUCUCCAGGAGCUGUG | 78 | 72 |
| 686 | 679 | AGCUCCUGGAGAGAGUGUUCC | 1923 | AACACUCUCUCCAGGAGCUGU | 80 | 74 |
| 687 | 680 | GCUCCUGGAGAGAGUGUUCCC | 1924 | GAACACUCUCUCCAGGAGCUG | 81.5 | 75.5 |
| 688 | 681 | CUCCUGGAGAGAGUGUUCCCG | 1925 | GGAACACUCUCUCCAGGAGCU | 56.5 | 50.5 |
| 689 | 682 | UCCUGGAGAGAGUGUUCCCGC | 1926 | GGGAACACUCUCUCCAGGAGC | 54 | 48 |
| 690 | 683 | CCUGGAGAGAGUGUUCCCGCU | 1927 | CGGGAACACUCUCUCCAGGAG | 63.8 | 57.8 |
| 691 | 684 | CUGGAGAGAGUGUUCCCGCUG | 1928 | GCGGGAACACUCUCUCCAGGA | 59.5 | 53.5 |
| 692 | 685 | UGGAGAGAGUGUUCCCGCUGC | 1929 | AGCGGGAACACUCUCUCCAGG | 74.6 | 68.6 |
| 693 | 686 | GGAGAGAGUGUUCCCGCUGCU | 1930 | CAGCGGGAACACUCUCUCCAG | 77.3 | 71.3 |
| 694 | 687 | GAGAGAGUGUUCCCGCUGCUG | 1931 | GCAGCGGGAACACUCUCUCCA | 67.2 | 61.2 |
| 695 | 688 | AGAGAGUGUUCCCGCUGCUGC | 1932 | AGCAGCGGGAACACUCUCUCC | 72.2 | 66.2 |
| 696 | 689 | GAGAGUGUUCCCGCUGCUGCA | 1933 | CAGCAGCGGGAACACUCUCUC | 65.7 | 59.7 |
| 697 | 690 | AGAGUGUUCCCGCUGCUGCAC | 1934 | GCAGCAGCGGGAACACUCUCU | 61.3 | 55.3 |
| 698 | 691 | GAGUGUUCCCGCUGCUGCACC | 1935 | UGCAGCAGCGGGAACACUCUC | 83.8 | 77.8 |
| 699 | 692 | AGUGUUCCCGCUGCUGCACCC | 1936 | GUGCAGCAGCGGGAACACUCU | 61.3 | 66.3 |
| 700 | 693 | GUGUUCCCGCUGCUGCACCCA | 1937 | GGUGCAGCAGCGGGAACACUC | 49.4 | 42.4 |
| 701 | 694 | UGUUCCCGCUGCUGCACCCAC | 1938 | GGGUGCAGCAGCGGGAACACU | 51.7 | 44.7 |
| 702 | 695 | GUUCCCGCUGCUGCACCCACA | 1939 | UGGGUGCAGCAGCGGGAACAC | 61.8 | 54.8 |
| 703 | 696 | UUCCCGCUGCUGCACCCACAG | 1940 | GUGGGUGCAGCAGCGGGAACA | 47.4 | 40.4 |
| 704 | 697 | UCCCGCUGCUGCACCCACAGU | 1941 | UGUGGGUGCAGCAGCGGGAAC | 61.9 | 54.9 |
| 705 | 698 | CCCGCUGCUGCACCCACAGUA | 1942 | CUGUGGGUGCAGCAGCGGGAA | 66.2 | 59.2 |
| 706 | 699 | CCGCUGCUGCACCCACAGUAC | 1943 | ACUGUGGGUGCAGCAGCGGGA | 74.1 | 67.1 |
| 707 | 700 | CGCUGCUGCACCCACAGUACA | 1944 | UACUGUGGGUGCAGCAGCGGG | 89.1 | 82.1 |
| 708 | 701 | GCUGCUGCACCCACAGUACAG | 1945 | GUACUGUGGGUGCAGCAGCGG | 77.2 | 70.2 |
| 709 | 702 | CUGCUGCACCCACAGUACAGC | 1946 | UGUACUGUGGGUGCAGCAGCG | 81.2 | 74.2 |
| 710 | 703 | UGCUGCACCCACAGUACAGCU | 1947 | CUGUACUGUGGGUGCAGCAGC | 58.9 | 51.9 |
| 711 | 704 | GCUGCACCCACAGUACAGCUU | 1948 | GCUGUACUGUGGGUGCAGCAG | 61.8 | 54.8 |
| 712 | 705 | CUGCACCCACAGUACAGCUUC | 1949 | AGCUGUACUGUGGGUGCAGCA | 67.4 | 60.4 |
| 713 | 706 | UGCACCCACAGUACAGCUUCC | 1950 | AAGCUGUACUGUGGGUGCAGC | 64.4 | 57.4 |
| 714 | 707 | GCACCCACAGUACAGCUUCCC | 1951 | GAAGCUGUACUGUGGGUGCAG | 71.1 | 64.1 |
| 735 | 708 | CCCUGACUACCUGCUCUGCCU | 1952 | GCAGAGCAGGUAGUCAGGGGG | 64.2 | 57.2 |
| 736 | 709 | CCUGACUACCUGCUCUGCCUC | 1953 | GGCAGAGCAGGUAGUCAGGGG | 59.7 | 52.7 |
| 737 | 710 | CUGACUACCUGCUCUGCCUCU | 1954 | AGGCAGAGCAGGUAGUCAGGG | 76.6 | 69.8 |
| 738 | 711 | UGACUACCUGCUCUGCCUCUC | 1955 | GAGGCAGAGCAGGUAGUCAGG | 60.3 | 53.3 |
| 739 | 712 | GACUACCUGCUCUGCCUCUCA | 1956 | AGAGGCAGAGCAGGUAGUCAG | 74.4 | 67.4 |
| 740 | 713 | ACUACCUGCUCUGCCUCUCAC | 1957 | GAGAGGCAGAGCAGGUAGUCA | 57.9 | 50.9 |
| 741 | 714 | CUACCUGCUCUGCCUCUCACG | 1958 | UGAGAGGCAGAGCAGGUAGUC | 74.9 | 67.9 |
| 742 | 715 | UACCUGCUCUGCCUCUCACGC | 1959 | GUGAGAGGCAGAGCAGGUAGU | 58.7 | 51.7 |
| 743 | 715 | UACCUGCUCUGCCUCUCACGC | 1960 | CGUGAGAGGCAGAGCAGGUAG | 57.9 | 50.9 |
| 744 | 717 | CCUGCUCUGCCUCUCACGCUU | 1961 | GCGUGAGAGGCAGAGCAGGUA | 59.9 | 52.9 |
| 745 | 718 | CUGCUCUGCCUCUCACGCUUG | 1962 | AGCGUGAGAGGCAGAGCAGGU | 64.7 | 57.7 |
| 746 | 719 | UGCUCUGCCUCUCACGCUUGG | 1963 | AAGCGUGAGAGGCAGAGCAGG | 77.1 | 70.1 |
| 781 | 720 | GGCUCUCUGCAGCCCUUUGGG | 1964 | CAAAGGGCUGCAGAGAGCCAU | 72.2 | 65.2 |
| 809 | 721 | CCCGCCGCCUCCGCCUGCAGA | 1965 | UGCAGGCGGAGGCGGCGGGGU | 60.6 | 52.6 |
| 810 | 722 | CCGCCGCCUCCGCCUGCAGAU | 1966 | CUGCAGGCGGAGGCGGCGGGG | 59.5 | 51.5 |
| 811 | 723 | CGCCGCGUCCGCCUGCAGAUA | 1967 | UCUGCAGGCGGAGGCGGCGGG | 71.1 | 63.1 |
| 812 | 724 | GCCGCCUCCGCCUGCAGAUAA | 1968 | AUCUGCAGGCGGAGGCGGCGG | 72.4 | 64.4 |
| 813 | 725 | CCGCCUCCGCCUGCAGAUAAC | 1969 | UAUCUGCAGGCGGAGGCGGCG | 77.6 | 69.6 |
| 814 | 726 | CGCCUCCGCCUGCAGAUAACC | 1970 | UUAUCUGCAGGCGGAGGCGGC | 77 | 69 |
| 815 | 727 | GCCUCCGCCUGCAGAUAACCC | 1971 | GUUAUCUGCAGGCGGAGGCGG | 70.4 | 62.4 |
| 816 | 728 | CCUCCGCCUGCAGAUAACCCG | 1972 | GGUUAUCUGCAGGCGGAGGCG | 55.9 | 47.9 |
| 817 | 729 | CUCCGCCUGCAGAUAACCCGG | 1973 | GGGUUAUCUGCAGGCGGAGGC | 44.6 | 36.6 |
| 818 | 730 | UCCGCCUGCAGAUAACCCGGA | 1974 | CGGGUUAUCUGCAGGCGGAGG | 50.1 | 42.1 |
| 819 | 731 | CCGCCUGCAGAUAACCCGGAC | 1975 | CCGGGUUAUCUGCAGGCGGAG | 62.3 | 54.3 |
| 820 | 732 | CGCCUGCAGAUAACCCGGACC | 1976 | UCCGGGUUAUCUGCAGGCGGA | 76.9 | 58.9 |
| 821 | 733 | GCCUGCAGAUAACCCGGACCC | 1977 | GUCCGGGUUAUCUGCAGGCGG | 70 | 62 |
| 822 | 734 | CCUGCAGAUAACCCGGACCCU | 1978 | GGUCCGGGUUAUCUGCAGGCG | 60.4 | 52.4 |
| 823 | 735 | CUGCAGAUAACCCGGACCCUG | 1979 | GGGUCCGGGUUAUCUGCAGGC | 50.1 | 42.1 |
| 824 | 736 | UGCAGAUAACCCGGACCCUGG | 1980 | AGGGUCCGGGUUAUCUGCAGG | 65.3 | 57.3 |
| 825 | 737 | GCAGAUAACCGGGACCCUGGU | 1981 | CAGGGUCCGGGUUAUCUGCAG | 69.3 | 61.3 |
| 826 | 738 | CAGAUAACCCGGACCCUGGUG | 1982 | CCAGGGUCCGGGUUAUCUGCA | 60.1 | 52.1 |
| 827 | 739 | AGAUAACCGGGACCCUGGUGG | 1983 | ACCAGGGUCGGGGUUAUCUGC | 65.2 | 57.2 |
| 846 | 740 | GGCUGCCCGAGCCUUUGUGCA | 1984 | CACAAAGGCUCGGGCAGCCAC | 57.7 | 49.7 |
| 847 | 741 | GCUGCCCGAGCCUUUGUGCAG | 1985 | GCACAAAGGCUCGGGCAGCCA | 55.2 | 47.2 |
| 848 | 742 | CUGCCCGAGCCUUUGUGCAGG | 1986 | UGCACAAAGGCUCGGGCAGCC | 62.1 | 54.1 |
| 849 | 743 | UGCCCGAGCCUUUGUGCAGGG | 1987 | CUGCACAAAGGCUCGGGCAGC | 55.2 | 47.2 |
| 850 | 744 | GCCCGAGCCUUUGUGCAGGGC | 1988 | CCUGCACAAAGGCUCGGGCAG | 60.4 | 52.4 |
| 851 | 745 | CCCGAGCCUUUGUGCAGGGCC | 1989 | CCCUGCACAAAGGCUCGGGCA | 57.7 | 49.7 |
| 852 | 745 | CCGAGCCUUUGUGCAGGGCCU | 1990 | GCCCUGCACAAAGGCUCGGGC | 45.9 | 37.9 |
| 853 | 747 | CGAGCCUUUGUGCAGGGCCUG | 1991 | GGCCCUGCACAAAGGCUCGGG | 56.3 | 48.3 |
| 854 | 748 | GAGCCUUUGUGCAGGGCCUGG | 1992 | AGGCCCUGCACAAAGGCUCGG | 73.6 | 65.6 |
| 855 | 749 | AGCCUUUGUGCAGGGCCUGGA | 1993 | CAGGCCCUGCACAAAGGCUCG | 55 | 47 |
| 856 | 750 | GCCUUUGUGCAGGGCCUGGAG | 1994 | CCAGGCCCUGCACAAAGGCUC | 50.3 | 42.3 |
| 857 | 751 | CCUUUGUGCAGGGCCUGGAGA | 1995 | UCCAGGCCCUGCACAAAGGCU | 69.2 | 61.2 |
| 858 | 752 | CUUUGUGCAGGGCCUGGAGAC | 1996 | CUCCAGGCCCUGCACAAAGGC | 54.5 | 46.5 |
| 859 | 753 | UUUGUGCAGGGCCUGGAGACU | 1997 | UCUCCAGGCCCUGCACAAAGG | 60.9 | 52.9 |
| 860 | 754 | UUGUGCAGGGCCUGGAGACUG | 1998 | GUCUCCAGGCCCUGCACAAAG | 47.9 | 39.9 |
| 861 | 755 | UGUGCAGGGCCUGGAGACUGG | 1999 | AGUCUCCAGGCCCUGCACAAA | 60.6 | 52.6 |
| 862 | 756 | GUGCAGGGCCUGGAGACUGGA | 2000 | CAGUCUCCAGGCCCUGCACAA | 59.1 | 51.1 |
| 863 | 757 | UGCAGGGCCUGGAGACUGGAA | 2001 | CCAGUCUCCAGGCCCUGCACA | 53.4 | 53.4 |
| 864 | 758 | GCAGGGCCUGGAGACUGGAAG | 2002 | UCCAGUCUCCAGGCCCUGCAC | 70.4 | 62.4 |
| 865 | 759 | CAGGGCCUGGAGACUGGAAGA | 2003 | UUCCAGUCUCCAGGCCCUGCA | 75.6 | 67.6 |
| 866 | 760 | AGGGCCUGGAGACUGGAAGAA | 2004 | CUUCCAGUCUCCAGGCCCUGC | 54.1 | 46.1 |
| 867 | 761 | GGGCCUGGAGACUGGAAGAAA | 2005 | UCUUCCAGUCUCCAGGCCCUG | 87.6 | 79.6 |
| 868 | 762 | GGCCUGGAGACUGGAAGAAAU | 2006 | UUCUUCCAGUCUCCAGGCCCU | 83.3 | 75.3 |
| 869 | 763 | GCCUGGAGACUGGAAGAAAUG | 2007 | UUUCUUCCAGUCUCCAGGCCC | 82.9 | 74.9 |
| 870 | 764 | CCUGGAGACUGGAAGAAAUGU | 2008 | AUUUCUUCCAGUCUCCAGGCC | 83.3 | 75.3 |
| 871 | 765 | CUGGAGACUGGAAGAAAUGUG | 2009 | CAUUUCUUCCAGUCUCCAGGC | 67.1 | 59.1 |
| 872 | 766 | UGGAGACUGGAAGAAAUGUGG | 2010 | ACAUUUCUUCCAGUCUCCAGG | 74.6 | 66.6 |
| 873 | 767 | GGAGACUGGAAGAAAUGUGGU | 2011 | CACAUUUCUUCCAGUCUCCAG | 80.5 | 72.5 |
| 874 | 768 | GAGACUGGAAGAAAUGUGGUC | 2012 | CCACAUUUCUUCCAGUCUCCA | 71.8 | 63.8 |
| 875 | 769 | AGACUGGAAGAAAUGUGGUCA | 2013 | ACCACAUUUCUUCCAGUCUCC | 70 | 62 |
| 876 | 770 | GACUGGAAGAAAUGUGGUCAG | 2014 | GACCACAUUUCUUCCAGUCUC | 69.5 | 61.5 |
| 877 | 771 | ACUGGAAGAAAUGUGGUCAGC | 2015 | UGACCACAUUUCUUCCAGUCU | 75.8 | 67.8 |
| 878 | 772 | CUGGAAGAAAUGUGGUCAGCG | 2016 | CUGACCACAUUUCUUCCAGUC | 68.1 | 60.1 |
| 879 | 773 | UGGAAGAAAUGUGGUCAGCGA | 2017 | GCUGACCACAUUUCUUCCAGU | 60.4 | 52.4 |
| 880 | 774 | GGAAGAAAUGUGGUCAGCGAA | 2018 | CGCUGACCACAUUUCUUCCAG | 68.6 | 60.6 |
| 881 | 775 | GAAGAAAUGUGGUCAGCGAAG | 2019 | UCGCUGACCACAUUUCUUCCA | 93 | 85 |
| 882 | 776 | AAGAAAUGUGGUCAGCGAAGC | 2020 | UUCGCUGACCACAUUUCUUCC | 82 | 74 |
| 883 | 777 | AGAAAUGUGGUCAGCGAAGCG | 2021 | CUUCGCUGACCACAUUUCUUC | 70.4 | 62.4 |
| 884 | 778 | GAAAUGUGGUCAGCGAAGCGC | 2022 | GCUUCGCUGACCACAUUUCUU | 69.5 | 61.5 |
| 885 | 779 | AAAUGUGGUCAGCGAAGCGCU | 2023 | CGCUUCGCUGACCACAUUUCU | 63.9 | 55.9 |
| 886 | 780 | AAUGUGGUCAGCGAAGCGCUU | 2024 | GCGCUUCGCUGACCACAUUUC | 52 | 44 |
| 887 | 781 | AUGUGGUCAGCGAAGCGCUUA | 2025 | AGCGCUUCGCUGACCACAUUU | 73.7 | 65.7 |
| 888 | 782 | UGUGGUCAGCGAAGCGCUUAA | 2026 | AAGCGCUUCGCUGACCACAUU | 81.9 | 73.9 |
| 889 | 783 | GUGGUCAGCGAAGCGCUUAAG | 2027 | UAAGCGCUUCGCUGACCACAU | 81.6 | 73.6 |
| 890 | 784 | UGGUCAGCGAAGCGCUUAAGG | 2028 | UUAAGCGCUUCGCUGACCACA | 85.8 | 77.8 |
| 891 | 785 | GGUCAGCGAAGCGCUUAAGGU | 2029 | CUUAAGCGCUUCGCUGACCAC | 70.6 | 62.6 |
| 892 | 786 | GUCAGCGAAGCGCUUAAGGUG | 2030 | CCUUAAGCGCUUCGCUGACCA | 58.6 | 50.6 |
| 893 | 787 | UCAGCGAAGCGCUUAAGGUGC | 2031 | ACCUUAAGCGCUUCGCUGACC | 60 | 52 |
| 894 | 788 | CAGCGAAGCGCUUAAGGUGCC | 2032 | CACCUUAAGCGCUUCGCUGAC | 67.2 | 59.2 |
| 895 | 789 | AGCGAAGCGCUUAAGGUGCCG | 2033 | GCACCUUAAGCGCUUCGCUGA | 65.1 | 57.1 |
| 896 | 790 | GCGAAGCGCUUAAGGUGCCGG | 2034 | GGCACCUUAAGCGCUUCGCUG | 68.3 | 60.3 |
| 897 | 791 | CGAAGCGCUUAAGGUGCCGGU | 2035 | CGGCACCUUAAGCGCUUCGCU | 60.4 | 52.4 |
| 898 | 792 | GAAGCGCUUAAGGUGCCGGUG | 2036 | CCGGCACCUUAAGCGCUUCGC | 51.1 | 43.1 |
| 899 | 793 | AAGCGCUUAAGGUGCCGGUGU | 2037 | ACCGGCACCUUAAGCGCUUCG | 62.4 | 54.4 |
| 900 | 794 | AGCGCUUAAGGUGCCGGUGUC | 2038 | CACCGGCACCUUAAGCGCUUC | 56.3 | 47.3 |
| 901 | 795 | GCGCUUAAGGUGCCGGUGUCU | 2039 | ACACCGGCACCUUAAGCGCUU | 76.2 | 67.2 |
| 902 | 796 | CGCUUAAGGUGCCGGUGUCUG | 2040 | GACACCGGCACCUUAAGCGCU | 70.2 | 61.2 |
| 903 | 797 | GCUUAAGGUGCCGGUGUCUGA | 2041 | AGACACCGGCACCUUAAGCGC | 69 | 60 |
| 904 | 798 | CUUAAGGUGCCGGUGUCUGAA | 2042 | CAGACACCGGCACCUUAAGCG | 60.1 | 51.1 |
| 905 | 799 | UUAAGGUGCCGGUGUCUGAAG | 2043 | UCAGACACCGGCACCUUAAGC | 65.2 | 56.2 |
| 906 | 800 | UAAGGUGCCGGUGUCUGAAGG | 2044 | UUCAGACACCGGCACCUUAAG | 73.2 | 64.2 |
| 907 | 801 | AAGGUGCCGGUGUCUGAAGGC | 2045 | CUUCAGACACCGGCACCUUAA | 62.8 | 53.8 |
| 908 | 802 | AGGUGCCGGUGUCUGAAGGCU | 2046 | CCUUCAGACACCGGCACCUUA | 62.1 | 53.1 |
| 909 | 803 | GGUGCCGGUGUCUGAAGGCUG | 2047 | GCCUUCAGACACCGGCACCUU | 60.9 | 51.9 |
| 910 | 804 | GUGCCGGUGUCUGAAGGCUGC | 2048 | AGCCUUCAGACACCGGCACCU | 66.8 | 57.8 |
| 911 | 805 | UGCCGGUGUCUGAAGGCUGCA | 2049 | CAGCCUUCAGACACCGGCACC | 55.2 | 46.2 |
| 912 | 806 | GCCGGUGUCUGAAGGCUGCAG | 2050 | GCAGCCUUCAGACACCGGCAC | 61.4 | 52.4 |
| 913 | 807 | CCGGUGUCUGAAGGCUGCAGC | 2051 | UGCAGCCUUCAGACACCGGCA | 76.5 | 67.5 |
| 914 | 808 | CGGUGUCUGAAGGCUGCAGCC | 2052 | CUGCAGCCUUCAGACACCGGC | 66.5 | 57.5 |
| 915 | 809 | GGUGUCUGAAGGCUGCAGCCA | 2053 | GCUGCAGCCUUCAGACACCGG | 65.3 | 56.3 |
| 916 | 810 | GUGUCUGAAGGCUGCAGCCAG | 2054 | GGCUGCAGCCUUCAGACACCG | 58.8 | 49.8 |
| 935 | 811 | AGGCUCUGAUGCGUCUCAUCG | 2055 | AUGAGACGCAUCAGAGCCUGG | 77 | 68 |
| 936 | 812 | GGCUCUGAUGCGUCUCAUCGG | 2056 | GAUGAGACGCAUCAGAGCCUG | 76.5 | 67.5 |
| 937 | 813 | GCUCUGAUGCGUCUCAUCGGC | 2057 | CGAUGAGACGCAUCAGAGCCU | 65 | 56 |
| 938 | 814 | CUCUGAUGCGUCUCAUCGGCU | 2058 | CCGAUGAGACGCAUCAGAGCC | 55.3 | 46.3 |
| 939 | 815 | UCUGAUGCGUCUCAUCGGCUG | 2059 | GCCGAUGAGACGCAUCAGAGC | 46.4 | 37.4 |
| 940 | 816 | CUGAUGCGUCUCAUCGGCUGU | 2060 | AGCCGAUGAGACGCAUCAGAG | 64.6 | 55.6 |
| 941 | 817 | UGAUGCGUCUCAUCGGCUGUC | 2061 | CAGCCGAUGAGACGCAUCAGA | 62.1 | 53.1 |
| 942 | 818 | GAUGCGUCUCAUCGGCUGUCC | 2062 | ACAGCCGAUGAGACGCAUCAG | 79.4 | 70.4 |
| 943 | 819 | AUGCGUCUCAUCGGCUGUCCC | 2063 | GACAGCCGAUGAGACGCAUCA | 50.9 | 41.9 |
| 979 | 820 | CCCUCACUUAUGCCCUGCCAG | 2064 | GGCAGGGCAUAAGUGAGGGGA | 54.5 | 45.5 |
| 998 | 821 | AGGGCUUCUGCCUCAACGUGG | 2065 | ACGUUGAGGCAGAAGCCCUGG | 71 | 62 |
| 999 | 822 | GGGCUUCUGCCUCAACGUGGU | 2066 | CACGUUGAGGCAGAAGCCCUG | 71 | 62 |
| 1000 | 823 | GGCUUCUGCCUCAACGUGGUU | 2067 | CCACGUUGAGGCAGAAGCCCU | 62 | 52 |
| 1001 | 824 | GCUUCUGCCUCAACGUGGUUC | 2068 | ACCACGUUGAGGCAGAAGCCC | 71.6 | 61.6 |
| 1002 | 825 | CUUCUGCCUCAACGUGGUUCG | 2069 | AACCACGUUGAGGCAGAAGCC | 66.5 | 56.5 |
| 1003 | 826 | UUCUGCCUCAACGUGGUUCGU | 2070 | GAACCACGUUGAGGCAGAAGC | 38.9 | 28.9 |
| 1004 | 827 | UCUGCCUCAACGUGGUUCGUG | 2071 | CGAACCACGUUGAGGCAGAAG | 54.1 | 44.1 |
| 1005 | 828 | CUGCCUCAACGUGGUUCGUGG | 2072 | ACGAACCACGUUGAGGCAGAA | 68.2 | 58.2 |
| 1059 | 829 | GGGCAACUAUCUGGAUGGUCU | 2073 | ACCAUCCAGAUAGUUGCCCCA | 75 | 65 |
| 1060 | 830 | GGCAACUAUCUGGAUGGUCUC | 2074 | GACCAUCCAGAUAGUUGCCCC | 58 | 48 |
| 1061 | 831 | GCAACUAUCUGGAUGGUCUCC | 2075 | AGACCAUCCAGAUAGUUGCCC | 74.9 | 64.9 |
| 1062 | 832 | CAACUAUCUGGAUGGUCUCCU | 2076 | GAGACCAUCCAGAUAGUUGCC | 65.7 | 55.7 |
| 1063 | 833 | AACUAUCUGGAUGGUCUCCUG | 2077 | GGAGACCAUCCAGAUAGUUGC | 48.8 | 38.8 |
| 1064 | 834 | ACUAUCUGGAUGGUCUCCUGA | 2078 | AGGAGACCAUCCAGAUAGUUG | 64.4 | 54.4 |
| 1065 | 835 | CUAUCUGGAUGGUCUCCUGAU | 2079 | CAGGAGACCAUCCAGAUAGUU | 74.1 | 64.1 |
| 1066 | 836 | UAUCUGGAUGGUCUCCUGAUC | 2080 | UCAGGAGACCAUCCAGAUAGU | 70.1 | 60.1 |
| 1067 | 837 | AUCUGGAUGGUCUCCUGAUCC | 2081 | AUCAGGAGACCAUCCAGAUAG | 73.9 | 63.9 |
| 1068 | 838 | UCUGGAUGGUCUCCUGAUCCU | 2082 | GAUCAGGAGACCAUCCAGAUA | 64.5 | 54.5 |
| 1069 | 839 | CUGGAUGGUCUCCUGAUCCUG | 2083 | GGAUCAGGAGACCAUCCAGAU | 57 | 47 |
| 1070 | 840 | UGGAUGGUCUCCUGAUCCUGG | 2084 | AGGAUCAGGAGACCAUCCAGA | 71.6 | 61.6 |
| 1089 | 841 | GGCUGAUAAGCUCCAGGGCCC | 2085 | GCCCUGGAGCUUAUCAGCCAG | 63.4 | 53.4 |
| 1112 | 842 | UUUCCUUUGAGCUGACGGCCG | 2086 | GCCGUCAGCUCAAAGGAAAAG | 45.3 | 34.3 |
| 1113 | 843 | UUCCUUUGAGCUGACGGCCGA | 2087 | GGCCGUCAGCUCAAAGGAAAA | 36.6 | 25.6 |
| 1114 | 844 | UCCUUUGAGCUGACGGCCGAG | 2088 | CGGCCGUCAGCUCAAAGGAAA | 47.2 | 36.2 |
| 1115 | 845 | CCUUUGAGCUGACGGCCGAGU | 2089 | UCGGCCGUCAGCUCAAAGGAA | 81.2 | 70.2 |
| 1116 | 846 | CUUUGAGCUGACGGCCGAGUC | 2090 | CUCGGCCGUCAGCUCAAAGGA | 59.7 | 48.7 |
| 1117 | 847 | UUUGAGCUGACGGCCGAGUCC | 2091 | ACUCGGCCGUCAGCUCAAAGG | 54.1 | 43.1 |
| 1118 | 848 | UUGAGCUGACGGCCGAGUCCA | 2092 | GACUCGGCCGUCAGCUCAAAG | 50.2 | 39.2 |
| 1119 | 849 | UGAGCUGACGGCCGAGUCCAU | 2093 | GGACUCGGCCGUCAGCUCAAA | 54 | 43 |
| 1120 | 850 | GAGCUGACGGCCGAGUCCAUU | 2094 | UGGACUCGGCCGUCAGCUCAA | 77.8 | 66.8 |
| 1121 | 851 | AGCUGACGGCCGAGUCCAUUG | 2095 | AUGGACUCGGCCGUCAGCUCA | 77.7 | 66.7 |
| 1122 | 852 | GCUGACGGCCGAGUCCAUUGG | 2096 | AAUGGACUCGGCCGUCAGCUC | 68.2 | 57.2 |
| 1123 | 853 | CUGACGGCCGAGUCCAUUGGG | 2097 | CAAUGGACUCGGCCGUCAGCU | 62.8 | 51.8 |
| 1142 | 854 | GGGUGAAGAUCUCGGAGGGUU | 2098 | CCCUCCGAGAUCUUCACCCCA | 65.6 | 54.6 |
| 1143 | 855 | GGUGAAGAUCUCGGAGGGUUU | 2099 | ACCCUCCGAGAUCUUCACCCC | 64.3 | 53.3 |
| 1144 | 856 | GUGAAGAUCUCGGAGGGUUUG | 2100 | AACCCUCCGAGAUCUUCACCC | 67.2 | 56.2 |
| 1145 | 857 | UGAAGAUCUCGGAGGGUUUGA | 2101 | AAACCCUCCGAGAUCUUCACC | 67.7 | 56.7 |
| 1146 | 858 | GAAGAUCUCGGAGGGUUUGAU | 2102 | CAAACCCUCCGAGAUCUUCAC | 62.6 | 51.6 |
| 1147 | 859 | AAGAUCUCGGAGGGUUUGAUG | 2103 | UCAAACCCUCCGAGAUCUUCA | 67.3 | 56.3 |
| 1148 | 860 | AGAUCUCGGAGGGUUUGAUGU | 2104 | AUCAAACCCUCCGAGAUCUUC | 69.5 | 58.5 |
| 1149 | 861 | GAUCUCGGAGGGUUUGAUGUA | 2105 | CAUCAAACCCUCCGAGAUCUU | 65.6 | 54.6 |
| 1150 | 862 | AUCUCGGAGGGUUUGAUGUAC | 2106 | ACAUCAAACCCUCCGAGAUCU | 62.6 | 51.6 |
| 1151 | 863 | UCUCGGAGGGUUUGAUGUACC | 2107 | UACAUCAAACCCUCCGAGAUC | 73.3 | 62.3 |
| 1152 | 864 | CUCGGAGGGUUUGAUGUACCU | 2108 | GUACAUCAAACCCUCCGAGAU | 65 | 54 |
| 1153 | 865 | UCGGAGGGUUUGAUGUACCUG | 2109 | GGUACAUCAAACCCUCCGAGA | 54.9 | 43.9 |
| 1154 | 866 | CGGAGGGUUUGAUGUACCUGC | 2110 | AGGUACAUCAAACCCUCCGAG | 84 | 73 |
| 1155 | 867 | GGAGGGUUUGAUGUACCUGCA | 2111 | CAGGUACAUCAAACCCUCCGA | 72.8 | 61.8 |
| 1156 | 865 | GAGGGUUUGAUGUACCUGCAG | 2112 | GCAGGUACAUCAAACCCUCCG | 67 | 56 |
| 1157 | 869 | AGGGUUUGAUGUACCUGCAGG | 2113 | UGCAGGUACAUCAAACCCUCC | 77.7 | 66 |
| 1158 | 870 | GGGUUUGAUGUACCUGCAGGA | 2114 | CUGCAGGUACAUCAAACCCUC | 72.3 | 61.3 |
| 1159 | 871 | GGUUUGAUGUACCUGCAGGAA | 2115 | CCUGCAGGUACAUCAAACCCU | 72.4 | 61.4 |
| 1160 | 872 | GUUUGAUGUACCUGCAGGAAA | 2116 | UCCUGCAGGUACAUCAAACCC | 76.7 | 65.7 |
| 1179 | 873 | AAACAGUGCGAAGGUGUCCGC | 2117 | GGACACCUUCGCACUGUUUUC | 54.4 | 43.4 |
| 1180 | 874 | AACAGUGCGAAGGUGUCCGCC | 2118 | CGGACACCUUCGCACUGUUUU | 59 | 48 |
| 1181 | 875 | ACAGUGCGAAGGUGUCCGCCC | 2119 | GCGGACACCUUCGCACUGUUU | 62.6 | 51.6 |
| 1182 | 876 | CAGUGCGAAGGUGUCCGCCCA | 2120 | GGCGGACACCUUCGCACUGUU | 54.8 | 43.8 |
| 1183 | 877 | AGUGCGAAGGUGUCCGCCCAG | 2121 | GGGCGGACACCUUCGCACUGU | 60.1 | 49.1 |
| 1184 | 878 | GUGCGAAGGUGUCCGCCCAGG | 2122 | UGGGCGGACACCUUCGCACUG | 84.3 | 73.3 |
| 1185 | 879 | UGCGAAGGUGUCCGCCCAGGU | 2123 | CUGGGCGGACACCUUCGCACU | 57.9 | 46.9 |
| 1186 | 880 | GCGAAGGUGUCCGCCCAGGUG | 2124 | CCUGGGCGGACACCUUCGCAC | 55.7 | 44.7 |
| 1187 | 881 | CGAAGGUGUCCGCCCAGGUGU | 2125 | ACCUGGGCGGACACCUUCGCA | 73.5 | 62.5 |
| 1188 | 882 | GAAGGUGUCCGCCCAGGUGUU | 2126 | CACCUGGGCGGACACCUUCGC | 61.5 | 50.5 |
| 1189 | 883 | AAGGUGUCCGCCCAGGUGUUU | 2127 | ACACCUGGGCGGACACCUUCG | 66.1 | 55.1 |
| 1190 | 884 | AGGUGUCCGCCCAGGUGUUUC | 2128 | AACACCUGGGCGGACACCUUC | 74.3 | 63.3 |
| 1191 | 885 | GGUGUCCGCCCAGGUGUUUCA | 2129 | AAACACCUGGGCGGACACCUU | 77.3 | 66.3 |
| 1192 | 886 | GUGUCCGCCCAGGUGUUUCAG | 2130 | GAAACACCUGGGCGGACACCU | 56.6 | 45.6 |
| 1193 | 887 | UGUCCGCCCAGGUGUUUCAGG | 2131 | UGAAACACCUGGGCGGACACC | 67.9 | 56.9 |
| 1194 | 888 | GUCCGCCCAGGUGUUUCAGGA | 2132 | CUGAAACACCUGGGCGGACAC | 52.1 | 41.1 |
| 1195 | 889 | UCCGCCCAGGUGUUUCAGGAG | 2133 | CCUGAAACACCUGGGCGGACA | 43.3 | 32.3 |
| 1196 | 890 | CCGCCCAGGUGUUUCAGGAGU | 2134 | UCCUGAAACACCUGGGCGGAC | 70.4 | 59.4 |
| 1197 | 891 | CGCCCAGGUGUUUCAGGAGUG | 2135 | CUCCUGAAACACCUGGGCGGA | 69.7 | 58.7 |
| 1198 | 892 | GCCCAGGUGUUUCAGGAGUGC | 2136 | ACUCCUGAAACACCUGGGCGG | 80.8 | 69.8 |
| 1199 | 893 | CCGAGGUGUUUCAGGAGUGCG | 2137 | CACUCCUGAAACACCUGGGCG | 72.9 | 61.9 |
| 1200 | 894 | CCAGGUGUUUCAGGAGUGCGG | 2138 | GCACUCCUGAAACACCUGGGC | 62.5 | 50.5 |
| 1201 | 895 | CAGGUGUUUCAGGAGUGCGGC | 2139 | CGCACUCCUGAAACACCUGGG | 69 | 57 |
| 1202 | 896 | AGGUGUUUCAGGAGUGCGGCC | 2140 | CCGCACUCCUGAAACACCUGG | 71.9 | 59.9 |
| 1203 | 897 | GGUGUUUCAGGAGUGCGGCCC | 2141 | GCCGCACUCCUGAAACACCUG | 66.1 | 54.1 |
| 1225 | 898 | CCCGACCCGGUGCCUGCCCGC | 2142 | GGGCAGGCACCGGGUCGGGGG | 49 | 37 |
| 1226 | 899 | CCGACCCGGUGCCUGCCCGCA | 2143 | CGGGCAGGCACCGGGUCGGGG | 55.5 | 43.5 |
| 1227 | 900 | CGACCCGGUGCCUGCCCGCAA | 2144 | GCGGGCAGGCACCGGGUCGGG | 56 | 44 |
| 1228 | 901 | GACCCGGUGCCUGCCCGCAAC | 2145 | UGCGGGCAGGCACCGGGUCGG | 69.1 | 57.1 |
| 1229 | 902 | ACCCGGUGCCUGCCCGCAACC | 2146 | UUGCGGGCAGGCACCGGGUCG | 74.1 | 62.1 |
| 1230 | 903 | CCCGGUGCCUGCCCGCAACCG | 2147 | GUUGCGGGCAGGCACCGGGUC | 57.1 | 45.1 |
| 1231 | 904 | CCGGUGCCUGCCCGCAACCGU | 2148 | GGUUGCGGGCAGGCACCGGGU | 52.7 | 40.7 |
| 1232 | 905 | CGGUGCCUGCCCGCAACCGUC | 2149 | CGGUUGCGGGCAGGCACCGGG | 55.2 | 43.2 |
| 1233 | 906 | GGUGCCUGCCCGCAACCGUCG | 2150 | ACGGUUGCGGGCAGGCACCGG | 71.6 | 59.6 |
| 1234 | 907 | GUGCCUGCCCGCAACCGUCGA | 2151 | GACGGUUGCGGGCAGGCACCG | 57.2 | 45.2 |
| 1235 | 908 | UGCCUGCCCGCAACCGUCGAG | 2152 | CGACGGUUGCGGGCAGGCACC | 38.1 | 26.1 |
| 1236 | 909 | GCCUGCCCGCAACCGUCGAGC | 2153 | UCGACGGUUGCGGGCAGGCAC | 68.9 | 56.9 |
| 1237 | 910 | CCUGCCCGCAACCGUCGAGCC | 2154 | CUCGACGGUUGCGGGCAGGCA | 56.1 | 44.1 |
| 1238 | 911 | CUGCCCGCAACCGUCGAGCCC | 2155 | GCUCGACGGUUGCGGGCAGGC | 37.4 | 25.4 |
| 1265 | 912 | CCCGGGAAGAGGCGGGCCGGC | 2156 | CGGCCCGCCUCUUCCCGGGGC | 44.2 | 32.2 |
| 1266 | 913 | CCGGGAAGAGGCGGGCCGGCU | 2157 | CCGGCCCGCCUCUUCCCGGGG | 51.1 | 39.1 |
| 1267 | 914 | CGGGAAGAGGCGGGCCGGCUG | 2158 | GCCGGCCCGCCUCUUCCCGGG | 47.8 | 35.8 |
| 1268 | 915 | GGGAAGAGGCGGGCCGGCUGU | 2159 | AGCCGGCCCGCCUCUUCCCGG | 62.6 | 50.6 |
| 1269 | 916 | GGAAGAGGCGGGCCGGCUGUG | 2160 | CAGCCGGCCCGCCUCUUCCCG | 63.4 | 51.4 |
| 1270 | 917 | GAAGAGGCGGGCCGGCUGUGG | 2161 | ACAGCCGGCCCGCCUCUUCCC | 59.1 | 47.1 |
| 1271 | 918 | AAGAGGCGGGCCGGCUGUGGU | 2162 | CACAGCCGGCCCGCCUCUUCC | 42.4 | 30.4 |
| 1272 | 919 | AGAGGCGGGCCGGCUGUGGUC | 2163 | CCACAGCCGGCCCGCCUCUUC | 42.9 | 30.9 |
| 1273 | 920 | GAGGCGGGCCGGCUGUGGUCG | 2164 | ACCACAGCCGGCCCGCCUCUU | 65.8 | 53.8 |
| 1274 | 921 | AGGCGGGCCGGCUGUGGUCGA | 2165 | GACCACAGCCGGCCCGCCUCU | 53.8 | 41.8 |
| 1275 | 922 | GGCGGGCCGGCUGUGGUCGAU | 2166 | CGACCACAGCCGGCCCGCCUC | 48.2 | 36.2 |
| 1276 | 923 | GCGGGCCGGCUGUGGUCGAUG | 2167 | UCGACCACAGCCGGCCCGCCU | 74.9 | 62.9 |
| 1277 | 924 | CGGGCCGGCUGUGGUCGAUGG | 2168 | AUCGACCACAGCCGGCCCGCC | 65.7 | 53.7 |
| 1278 | 925 | GGGCCGGCUGUGGUCGAUGGU | 2169 | CAUCGACCACAGCCGGCCCGC | 59 | 47 |
| 1279 | 926 | GGCCGGCUGUGGUCGAUGGUG | 2170 | CCAUCGACCACAGCCGGCCCG | 71.2 | 59.2 |
| 1280 | 927 | GCCGGCUGUGGUCGAUGGUGA | 2171 | ACCAUCGACCACAGCCGGCCC | 67.3 | 55.3 |
| 1281 | 928 | CCGGCUGUGGUCGAUGGUGAC | 2172 | CACCAUCGACCACAGCCGGCC | 59.6 | 47.6 |
| 1282 | 929 | CGCCUGUGGUCGAUGGUGACC | 2173 | UCACCAUCGACCACAGCCGGC | 85.3 | 73.3 |
| 1283 | 930 | GGCUGUGGUCGAUGGUGACCG | 2174 | GUCACCAUCGACCACAGCCGG | 82.9 | 70.9 |
| 1284 | 931 | GCUGUGGUCCAUGGUGACCGA | 2175 | GGUCACCAUCGACCACAGCCG | 64.5 | 52.5 |
| 1285 | 932 | CUGUGGUaGAUGGUGACCGAG | 2176 | CGGUCACCAUCGACCACAGCC | 52.2 | 40.2 |
| 1286 | 933 | UGUGGUCGAUGGUGACCGAGG | 2177 | UCGGUCACCAUCGACCACAGC | 81.5 | 69.5 |
| 1287 | 934 | GUGGUCGAUGGUGACCGAGGA | 2178 | CUCGGUCACCAUCGACCACAG | 65.9 | 53.9 |
| 1288 | 935 | UGGUCGAUGGUGACCGAGGAG | 2179 | CCUCGGUCACCAUCGACCACA | 60.2 | 48.2 |
| 1289 | 936 | GGUCGAUGGUGACCGAGGAGG | 2180 | UCCUCGGUCACCAUCGACCAC | 88.9 | 76.9 |
| 1290 | 937 | GUCGAUGGUGACCGAGGAGGA | 2181 | CUCCUCGGUCACCAUCGACCA | 68.1 | 56.1 |
| 1291 | 938 | UCGAUGGUGACCGAGGAGGAG | 2182 | CCUCCUCGGUCACCAUCGACC | 44 | 32 |
| 1292 | 939 | CGAUGGUGACCGAGGAGGAGC | 2183 | UCCUCCUCGGUCACCAUCGAC | 84.9 | 72.9 |
| 1293 | 940 | GAUGGUGACCGAGGAGGAGCG | 2184 | CUCCUCCUCGGUCACCAUCGA | 70.6 | 58.6 |
| 1294 | 941 | AUGGUGACCGAGGAGGAGCGG | 2185 | GCUCCUCCUCGGUCACCAUCG | 49.1 | 37.1 |
| 1295 | 942 | UGGUGACCGAGGAGGAGCGGC | 2186 | CGCUCCUCCUCGGUCACCAUC | 52.5 | 40.5 |
| 1296 | 943 | GGUGACCGAGGAGGAGCGGCC | 2187 | CCGCUCCUCCUCGGUCACCAU | 61.4 | 49.4 |
| 1297 | 944 | GUGACCGAGGAGGAGCGGCCC | 2188 | GCCGCUCCUCCUCGGUCACCA | 47.4 | 35.4 |
| 1298 | 945 | UGACCGAGGAGGAGCGGCCCA | 2189 | GGCCGCUCCUCCUCGGUCACC | 41 | 29 |
| 1299 | 946 | GACCGAGGAGGAGCGGCCCAC | 2190 | GGGCCGCUCCUCCUCGGUCAC | 47.4 | 35.4 |
| 1300 | 947 | ACCGAGGAGGAGCGGCCCACG | 2191 | UGGGCCGCUCCUCCUCGGUCA | 66.6 | 53.6 |
| 1301 | 948 | CCGAGGAGGAGCGGCCCACGA | 2192 | GUGGGCCGCUCCUCCUCGGUC | 53 | 40 |
| 1302 | 949 | CGAGGAGGAGCGGCCCACGAC | 2193 | CGUGGGCCGCUCCUCCUCGGU | 59.1 | 46.1 |
| 1303 | 950 | GAGGAGGAGCGGCCCACGACG | 2194 | UCGUGGGCCGCUCCUCCUCGG | 80.4 | 67.4 |
| 1304 | 951 | AGGAGGAGCGGCCCACGACGG | 2195 | GUCGUGGGCCGCUCCUCCUCG | 80.4 | 47.4 |
| 1305 | 952 | GGAGGAGCGGCCCACGACGGC | 2196 | CGUCGUGGGCCGCUCCUCCUC | 61.2 | 48.2 |
| 1306 | 953 | GAGGAGCGGCCCACGACGGCC | 2197 | CCGUCGUGGGCCGCUCCUCCU | 58.8 | 45.8 |
| 1307 | 954 | AGGAGCGGCCCACGACGGCCG | 2198 | GCCGUCGUGGGCCGCUCCUCC | 41.9 | 28.9 |
| 1308 | 955 | GGAGCGGCCCACGACGGCCGC | 2199 | GGCCGUCGUGGGCCGCUCCUC | 49.4 | 36.4 |
| 1309 | 956 | GAGCGGCCCACGACGGCCGCA | 2200 | CGGCCGUCGUGGGCCGCUCCU | 53.6 | 40.6 |
| 1310 | 957 | AGCGGCCCACGACGGCCGCAG | 2201 | GCGGCCGUCGUGGGCCGCUCC | 39.8 | 26.8 |
| 1311 | 958 | GCGGCCCACGACGGCCGCAGG | 2202 | UGCGGCCGUCGUGGGCCGCUC | 60 | 47 |
| 1312 | 959 | CGGCCCACGACGGCCGCAGGC | 2203 | CUGCGGCCGUCGUGGGCCGCU | 53.4 | 40.4 |
| 1313 | 960 | GGCCCACGACGGCCGCAGGCA | 2204 | CCUGCGGCCGUCGUGGGCCGC | 54.9 | 41.9 |
| 1314 | 961 | GCCCACGACGGCCGCAGGCAC | 2205 | GCCUGCGGCCGUCGUGGGCCG | 48.1 | 35.1 |
| 1315 | 962 | CCCACGACGGCCGCAGGCACC | 2206 | UGCCUGCGGCCGUCGUGGGCC | 58.7 | 45.7 |
| 1316 | 963 | CCACGACGGCCGCAGGCACCA | 2207 | GUGCCUGCGGCCGUCGUGGGC | 59.6 | 46.6 |
| 1317 | 964 | CACGACGGCCGCAGGCACCAA | 2208 | GGUGCCUGCGGCCGUCGUGGG | 54.3 | 41.3 |
| 1318 | 965 | ACGACGGCCGCAGGCACCAAU | 2209 | UGGUGCCUGCGGCCGUCGUGG | 68.6 | 55.6 |
| 1319 | 966 | CGACGGCCGCAGGCACCAACC | 2210 | UUGGUGCCUGCGGCCGUCGUG | 85.8 | 73.8 |
| 1320 | 967 | GACGGCCGCAGGCACCAACCU | 2211 | GUUGGUGCCUGCGGCCGUCGU | 59.9 | 46.9 |
| 1321 | 968 | ACGGCCGCAGGCACCAACCUG | 2212 | GGUUGGUGCCUGCGGCCGUCG | 45.5 | 32.5 |
| 1322 | 969 | CGGCCGCAGGCACCAACCUGC | 2213 | AGGUUGGUGCCUGCGGCCGUC | 64.6 | 51.6 |
| 1323 | 970 | GGCCGCAGGCACCAACCUGCA | 2214 | CAGGUUGGUGCCUGCGGCCGU | 65.5 | 52.5 |
| 1324 | 971 | GCCGCAGGCACCAACCUGCAC | 2215 | GCAGGUUGGUGCCUGCGGCCG | 58.7 | 45.7 |
| 1325 | 972 | CCGCAGGCACCAACCUGCACC | 2216 | UGCAGGUUGGUGCCUGCGGCC | 70.5 | 57.5 |
| 1326 | 973 | CGCAGGCACCAACCUGCACCG | 2217 | GUGCAGGUUGGUGCCUGCGGC | 63.2 | 50.2 |
| 1327 | 974 | GCAGGCACCAACCUGCACCGG | 2218 | GGUGCAGGUUGGUGCCUGCGG | 58.4 | 45.4 |
| 1328 | 975 | CAGGCACCAACCUGCACCGGC | 2219 | CGGUGCAGGUUGGUGCCUGCG | 60 | 47 |
| 1329 | 976 | AGGCACCAACCUGCACCGGCU | 2220 | CCGGUGCAGGUUGGUGCCUGC | 46.5 | 33.5 |
| 1330 | 977 | GGCACCAACCUGCACCGGCUG | 2221 | GCCGGUGCAGGUUGGUGCCUG | 59.2 | 46.2 |
| 1331 | 978 | GCACCAACCUGCACCGGCUGG | 2222 | AGCCGGUGCAGGUUGGUGCCU | 74.1 | 61.1 |
| 1332 | 979 | CACCAACCUGCACCGGCUGGU | 2223 | CAGCCGGUGCAGGUUGGUGCC | 56.7 | 43.7 |
| 1333 | 980 | ACCAACCUGCACCGGCUGGUG | 2224 | CCAGCCGGUGCAGGUUGGUGC | 46.3 | 33.3 |
| 1334 | 981 | CCAACCUGCACCGGCUGGUGU | 2225 | ACCAGCCGGUGCAGGUUGGUG | 65.5 | 52.5 |
| 1335 | 982 | CAACCUGCACCGGCUGGUGUG | 2226 | CACCAGCCGGUGCAGGUUGGU | 63 | 50 |
| 1336 | 983 | AACCUGCACCGGCUGGUGUGG | 2227 | ACACCAGCCGGUGCAGGUUGG | 66.8 | 53.8 |
| 1337 | 984 | ACCUGCACCGGCUGGUGUGGG | 2228 | CACACCAGCCGGUGCAGGUUG | 64.3 | 51.3 |
| 1338 | 955 | CCUGCACCGGCUGGUGUGGGA | 2229 | CCACACCAGCCGGUGCAGGUU | 60.7 | 47.7 |
| 1339 | 986 | CUGCACCGGCUGGUGUGGGAG | 2230 | CCCACACCAGCCGGUGCAGGU | 47 | 34 |
| 1340 | 987 | UGCACCGGCUGGUGUGGGAGC | 2231 | UCCCACACCAGCCGGUGCAGG | 70.3 | 57.3 |
| 1341 | 988 | GCACCGGCUGGUGUGGGAGCU | 2232 | CUCCCACACCAGCCGGUGCAG | 62.5 | 49.5 |
| 1342 | 989 | CACCGGCUGGUGUGGGAGCUC | 2233 | GCUCCCACACCAGCCGGUGCA | 54.6 | 41.6 |
| 1343 | 990 | ACCGGCUGGUGUGGGAGCUCC | 2234 | AGCUCCCACACCAGCCGGUGC | 55.9 | 42.9 |
| 1344 | 991 | CCGGCUGGUGUGGGAGCUCCG | 2235 | GAGCUCCCACACCAGCCGGUG | 63.1 | 50.1 |
| 1345 | 992 | CGGCUGGUGUGGGAGCUCCGC | 2236 | GGAGCUCCCACACCAGCCGGU | 62.9 | 49.9 |
| 1346 | 993 | GGCUGGUGUGGGAGCUCCGCG | 2237 | CGGAGCUCCCACACCAGCCGG | 72.1 | 59.1 |
| 1347 | 994 | GCUGGUGUGGGAGCUCCGCGA | 2238 | GCGGAGCUCCCACACCAGCCG | 58.7 | 45.7 |
| 1348 | 995 | CUGGUGUGGGAGCUCCGCGAG | 2239 | CGCGGAGCUCCCACACCAGCC | 45.9 | 32.9 |
| 1349 | 996 | UGGUGUGGGAGCUCCGCGAGC | 2240 | UCGCGGAGCUCCCACACCAGC | 69.7 | 56.7 |
| 1350 | 997 | GGUGUGGGAGCUCCGCGAGCG | 2241 | CUCGCGGAGCUCCCACACCAG | 72 | 59 |
| 1351 | 998 | GUGUGGGAGCUCCGCGAGCGU | 2242 | GCUCGCGGAGCUCCCACACCA | 57.8 | 44.8 |
| 1352 | 999 | UGUGGGAGCUCCGCGAGCGUC | 2243 | CGCUCGCGGAGCUCCCACACC | 45.4 | 32.4 |
| 1353 | 1000 | GUGGGAGCUCCGCGAGCGUCU | 2244 | ACGCUCGCGGAGCUCCCACAC | 63.8 | 50.8 |
| 1354 | 1001 | UGGGAGCUCCGCGAGCGUCUG | 2245 | GACGCUCGCGGAGCUCCCACA | 50.5 | 37.5 |
| 1355 | 1002 | GGGAGCUCCGCGAGCGUCUGG | 2246 | AGACGCUCGCGGAGCUCCCAC | 67.3 | 54.3 |
| 1386 | 1003 | GGGCUUCUGGGCCCGGCUGUC | 2247 | CAGCCGGGCCCAGAAGCCCCG | 57 | 44 |
| 1387 | 1004 | GGCUUCUGGGCCCGGCUGUCC | 2248 | ACAGCCGGGCCCAGAAGCCCC | 56.8 | 43.8 |
| 1388 | 1005 | GCUUCUGGGCCCGGCUGUCCC | 2249 | GACAGCCGGGCCCAGAAGCCC | 50.8 | 37.6 |
| 1389 | 1006 | CUUCUGGGCCCGGCUGUCCCU | 2250 | GGACAGCCGGGCCCAGAAGCC | 36.1 | 23.1 |
| 1390 | 1007 | UUCUGGGCCCGGCUGUCCCUG | 2251 | GGGACAGCCGGGCCCAGAAGC | 31.3 | 18.3 |
| 1391 | 1008 | UCUGGGCCCGGCUGUCCCUGA | 2252 | AGGGACAGCCGGGCCCAGAAG | 54.2 | 41.2 |
| 1392 | 1009 | CUGGGCCCGGCUGUCCCUGAC | 2253 | CAGGGACAGCCGGGCCCAGAA | 44 | 31 |
| 1393 | 1010 | UGGGCCCGGCUGUCCCUGACG | 2254 | UCAGGGACAGCCGGGCCCAGA | 80.9 | 47.9 |
| 1394 | 1011 | GGGCCCGGCUGUCCCUGACGG | 2255 | GUCAGGGACAGCCGGGCCCAG | 63.1 | 50.1 |
| 1395 | 1012 | GGCCCGGCUGUCCCUGACGGU | 2256 | CGUCAGGGACAGCCGGGCCCA | 57.4 | 44.4 |
| 1396 | 1013 | GCCCGGCUGUCCCUGACGGUG | 2257 | CCGUCAGGGACAGCCGGGCCC | 52.9 | 39.9 |
| 1397 | 1014 | CCCGGCUGUCCCUGACGGUGU | 2258 | ACCGUCAGGGACAGCCGGGCC | 59.9 | 46.9 |
| 1398 | 1015 | CCGGCUGUCCCUGACGGUGUG | 2259 | CACCGUCAGGGACAGCCGGGC | 58.9 | 45.9 |
| 1399 | 1016 | CGGCUGUCCCUGACGGUGUGC | 2260 | ACACCGUCAGGGACAGCCGGG | 80.9 | 67.9 |
| 1400 | 1017 | GGCUGUCCCUGACGGUGUGCG | 2261 | CACACCGUCAGGGACAGCCGG | 81.1 | 67.1 |
| 1401 | 1018 | GCUGUCCCUGACGGUGUGCGG | 2262 | GCACACCGUCAGGGACAGCCG | 58.4 | 44.4 |
| 1402 | 1019 | CUGUCCCUGACGGUGUGCGGA | 2263 | CGCACACCGUCAGGGACAGCC | 44.7 | 30.7 |
| 1403 | 1020 | UGUCCCUGACGGUGUGCGGAG | 2264 | CCGCACACCGUCAGGGACAGC | 53.2 | 39.2 |
| 1404 | 1021 | GUCCCUGACGGUGUGCGGAGA | 2265 | UCCGCACACCGUCAGGGACAG | 73.6 | 59.6 |
| 1405 | 1022 | UCCCUGACGGUGUGCGGAGAC | 2266 | CUCCGCACACCGUCAGGGACA | 54.6 | 40.6 |
| 1406 | 1023 | CCCUGACGGUGUGCGGAGACU | 2267 | UCUCCGCACACCGUCAGGGAC | 76.6 | 62.6 |
| 1407 | 1024 | CCUGACGGUGUGCGGAGACUC | 2268 | GUCUCCGCACACCGUCAGGGA | 66.8 | 52.8 |
| 1408 | 1025 | CUGACGGUGUGCGGAGACUCU | 2269 | AGUCUCCGCACACCGUCAGGG | 76.3 | 62.3 |
| 1409 | 1026 | UGACGGUGUGCGGAGACUCUC | 2270 | GAGUCUCCGCACACCGUCAGG | 66.8 | 52.1 |
| 1410 | 1027 | GACGGUGUGCGGAGACUCUCG | 2271 | AGAGUCUCCGCACACCGUCAG | 55.1 | 71.1 |
| 1411 | 1028 | ACGGUGUGCGGAGACUCUCGC | 2272 | GAGAGUCUCCGCACACCGUCA | 65.2 | 51.2 |
| 1412 | 1029 | CGGUGUGCGGAGACUCUCGCA | 2273 | CGAGAGUCUCCGCACACCGUC | 69.5 | 55.5 |
| 1413 | 1030 | GGUGUGCGGAGACUCUCGCAU | 2274 | GCGAGAGUCUCCGCACACCGU | 68.6 | 54.6 |
| 1414 | 1031 | GUGUGCGGAGACUCUCGCAUG | 2275 | UGCGAGAGUCUCCGCACACCG | 78.1 | 64.1 |
| 1415 | 1032 | UGUGCGGAGACUCUCGCAUGG | 2276 | AUGCGAGAGUCUCCGCACACC | 65.2 | 51.2 |
| 1434 | 1033 | GGCAGCGGACGCCUCGCUGGA | 2277 | CAGCGAGGCGUCCGCUGCCAU | 62.5 | 48.5 |
| 1435 | 1034 | GCAGCGGACGCCUCGCUGGAG | 2278 | CCAGCGAGGCGUCCGCUGCCA | 60.6 | 46.6 |
| 1436 | 1035 | CAGCGGACGCCUCGCUGGAGG | 2279 | UCCAGCGAGGCGUCCGCUGCC | 69.5 | 55.5 |
| 1437 | 1036 | AGCGGACGCCUCGCUGGAGGC | 2280 | CUCCAGCGAGGCGUCCGCUGC | 52.1 | 38.1 |
| 1438 | 1037 | GCGGACGCGUCGCUGGAGGCG | 2281 | CCUCCAGCGAGGCGUCCGCUG | 59.8 | 45.8 |
| 1439 | 1038 | CGGACGCCUCGCUGGAGGCGG | 2282 | GCCUCCAGCGAGGCGUCCGCU | 54.2 | 40.2 |
| 1440 | 1039 | GGACGCCUCGCUGGAGGCGGC | 2283 | CGCCUCCAGCGAGGCGUCCGC | 46.6 | 32.6 |
| 1441 | 1040 | GACGCCUCGCUGGAGGCGGCG | 2284 | CCGCCUCCAGCGAGGCGUCCG | 50 | 36 |
| 1442 | 1041 | ACGCCUCGCUGGAGGCGGCGC | 2285 | GCCGCCUCCAGCGAGGCGUCC | 40.9 | 26.9 |
| 1443 | 1042 | CGCCUCGCUGGAGGCGGCGCC | 2286 | CGCCGCCUCCAGCGAGGCGUC | 41.2 | 27.2 |
| 1444 | 1043 | GCCUCGCUGGAGGCGGCGCCC | 2287 | GCGCCGCCUCCAGCGAGGCGU | 49.9 | 35.9 |
| 1445 | 1044 | CCUCGCUGGAGGCGGCGCCCU | 2288 | GGCGCCGCCUCCAGCGAGGCG | 45.7 | 31.7 |
| 1446 | 1045 | CUCGCUGGAGGCGGCGCCCUG | 2289 | GGGCGCCGCCUCCAGCGAGGC | 36.1 | 22.1 |
| 1447 | 1046 | UCGCUGGAGGCGGCGCCCUGC | 2290 | AGGGCGCCGCCUCCAGCGAGG | 48.8 | 34.8 |
| 1448 | 1047 | CGCUGGAGGCGGCGCCCUGCU | 2291 | CAGGGCGCCGCCUCCAGCGAG | 64.2 | 50.2 |
| 1449 | 1048 | GCUGGAGGCGGCGCCCUGCUG | 2292 | GCAGGGCGCCGCCUCCAGCGA | 52.8 | 38.8 |
| 1450 | 1049 | CUGGAGGCGGGGCCCUGCUGG | 2293 | AGCAGGGCGCCGCCUCCAGCG | 58.7 | 44.7 |
| 1451 | 1050 | UGGAGGCGGGGCCCUGCUGGA | 2294 | CAGCAGGGCGCCGCCUCCAGC | 47.6 | 33.6 |
| 1452 | 1051 | GGAGGCGGCGCCCUGCUGGAC | 2295 | CCAGCAGGGCGCCGCCUCCAG | 55.2 | 41.2 |
| 1453 | 1052 | GAGGCGGCGCCCUGCUGGACC | 2296 | UCCAGCAGGGCGCCGCCUCCA | 71.9 | 57.9 |
| 1454 | 1053 | AGGCGGCGCCCUGCUGGACCG | 2297 | GUCCAGCAGGGCGCCGCCUCC | 45.4 | 31.4 |
| 1455 | 1054 | GGCGGCGCCCUGCUGGACCGG | 2298 | GGUCCAGCAGGGCGCCGCCUC | 47.1 | 33.1 |
| 1456 | 1055 | GCGGCGCCCUGCUGGACCGGA | 2299 | CGGUCCAGCAGGGCGCCGCCU | 60.4 | 46.4 |
| 1457 | 1056 | CGGCGCCCUGCUGGACCGGAG | 2300 | CCGGUCCAGCAGGGCGCCGCC | 44.1 | 30.1 |
| 1458 | 1057 | GGCGCCCUGCUGGACCGGAGC | 2301 | UCCGGUCCAGCAGGGCGCCGC | 64.9 | 50.9 |
| 1459 | 1058 | GCGCCCUGCUGGACCGGAGCC | 2302 | CUCCGGUCCAGCAGGGCGCCG | 65.7 | 51.7 |
| 1460 | 1059 | CGCCCUGCUGGACCGGAGCCG | 2303 | GCUCCGGUCCAGCAGGGCGCC | 51.3 | 37.3 |
| 1461 | 1060 | GCCCUGCUGGAGCGGAGCCGG | 2304 | GGCUCCGGUCCAGCAGGGCGC | 48.3 | 34.3 |
| 1462 | 1061 | CCCUGCUGGACCGGAGCCGGG | 2305 | CGGCUCCGGUCCAGCAGGGCG | 51.1 | 37.1 |
| 1463 | 1062 | CCUGCUGGACCGGAGCCGGGC | 2306 | CCGGCUCCGGUCGAGCAGGGC | 53.1 | 39.1 |
| 1464 | 1063 | CUGCUGGACCGGAGCCGGGCG | 2307 | CCCGGCUCCGGUCCAGCAGGG | 55 | 41 |
| 1465 | 1064 | UGCUGGACCGGAGCCGGGCGG | 2308 | GCCCGGCUCCGGUCCAGCAGG | 44 | 30 |
| 1466 | 1065 | GCUGGACCGGAGCCGGGCGGG | 2309 | CGCCCGGCUCCGGUCCAGCAG | 57.1 | 43.1 |
| 1518 | 1066 | CCCGGCCGAGCAGGUCAACAA | 2310 | GUUGACCUGCUCGGCCGGGGA | 58.7 | 43.7 |
| 1519 | 1067 | CCGGCCGAGCAGGUCAACAAC | 2311 | UGUUGACCUGCUCGGCCGGGG | 75.2 | 60.2 |
| 1520 | 1068 | CGGCCGAGCAGGUCAACAACC | 2312 | UUGUUGACCUGCUCGGCCGGG | 95.7 | 80.7 |
| 1521 | 1069 | GGCCGAGCAGGUCAACAACCC | 2313 | GUUGUUGACCUGCUCGGCCGG | 78.4 | 63.4 |
| 1540 | 1070 | CCCGAGCUCAAGGUGGACGCC | 2314 | CGUCCACCUUGAGCUCGGGGU | 60.5 | 45.5 |
| 1541 | 1071 | CCGAGCUCAAGGUGGACGCCU | 2315 | GCGUCCACCUUGAGCUCGGGG | 65.5 | 50.5 |
| 1542 | 1072 | CGAGCUCAAGGUGGACGCCUC | 2316 | GGCGUCCACCUUGAGCUCGGG | 64.1 | 49.1 |
| 1543 | 1073 | GAGCUCAAGGUGGACGCCUCG | 2317 | AGGCGUCCACCUUGAGCUCGG | 68.9 | 53.9 |
| 1544 | 1074 | AGCUCAAGGUGGACGCCUCGG | 2318 | GAGGCGUCCACCUUGAGCUCG | 69.6 | 54.6 |
| 1545 | 1075 | GCUCAAGGUGGACGCCUCGGG | 2319 | CGAGGCGUCCACCUUGAGCUC | 62:3 | 47.3 |
| 1546 | 1076 | CUCAAGGUGGACGCGUCGGGC | 2320 | CCGAGGCGUCCACCUUGAGCU | 51.8 | 36.8 |
| 1547 | 1077 | UCAAGGUGGACGCCUCGGGCC | 2321 | CCCGAGGCGUCCACCUUGAGC | 42.4 | 27.4 |
| 1548 | 1078 | CAAGGUGGACGCCUCGGGCCC | 2322 | GCCCGAGGCGUCCACCUUGAG | 53.4 | 38.4 |
| 1567 | 1079 | CCCGAUGUCCCGACACGGCGG | 2323 | GCCGUGUCGGGACAUCGGGGC | 57.8 | 42.8 |
| 1568 | 1080 | CCGAUGUCCCGACACGGCGGC | 2324 | CGCCGUGUCGGGACAUCGGGG | 69.5 | 54.5 |
| 1569 | 1081 | CGAUGUCCCGACACGGCGGCG | 2325 | CCGCCGUGUCGGGACAUCGGG | 73.8 | 58.8 |
| 1570 | 1082 | GAUGUCCCGACACGGCGGCGU | 2326 | GCCGCCGUGUCGGGACAUCGG | 57 | 42 |
| 1571 | 1083 | AUGUCCCGACACGGCGGCGUC | 2327 | CGCCGCCGUGUCGGGACAUCG | 44.8 | 29.8 |
| 1572 | 1084 | UGUCCCGACACGGCGGCGUCG | 2328 | ACGCCGCCGUGUCGGGACAUC | 51.2 | 36.2 |
| 1573 | 1085 | GUCCCGACACGGCGGCGUCGG | 2329 | GACGCCGCCGUGUCGGGACAU | 60.6 | 45.6 |
| 1574 | 1086 | UCCCGACACGGCGGCGUCGGC | 2330 | CGACGCCGCCGUGUCGGGACA | 44.4 | 29.4 |
| 1575 | 1087 | CCCGACACGGCGGCGUCGGCU | 2331 | CCGACGCCGCCGUGUCGGGAC | 45.7 | 30.7 |
| 1576 | 1088 | CGGACACGGCGGCGUCGGCUA | 2332 | GCCGACGCCGCCGUGUCGGGA | 57 | 42 |
| 1577 | 1089 | CGACACGGCGGCGUCGGCUAC | 2333 | AGCGGACGCCGCCGUGUCGGG | 64.3 | 49.3 |
| 1578 | 1090 | GACACGGCGGCGUCGGCUACA | 2334 | UAGCCGACGCCGCCGUGUCGG | 84.8 | 69.8 |
| 1579 | 1091 | ACACGGCGGCGUCGGCUACAG | 2335 | GUAGCCGACGCCGCCGUGUCG | 60.7 | 45.7 |
| 1580 | 1092 | CACGGCGGCGUCGGCUACAGC | 2336 | UGUAGCCGACGCCGCCGUGUC | 64.8 | 49.8 |
| 1581 | 1093 | ACGGCGGCGUCGGCUACAGCU | 2337 | CUGUAGCCGACGCCGCCGUGU | 61.7 | 46.7 |
| 1582 | 1094 | CGGCGGCGUCGGCUACAGCUC | 2338 | GCUGUAGCCGACGCCGCCGUG | 64.6 | 49.6 |
| 1583 | 1095 | GGCGGCGUCGGCUACAGCUCC | 2339 | AGCUGUAGCCGACGCCGCCGU | 73.4 | 58.4 |
| 1584 | 1096 | GCGGCGUCGGCUACAGCUCCG | 2340 | GAGCUGUAGCCGACGCCGCCG | 69.6 | 54.6 |
| 1585 | 1097 | CGGCGUCGGCUACAGCUCCGG | 2341 | GGAGCUGUAGCCGACGCCGCC | 57.7 | 42.7 |
| 1586 | 1098 | GGCGUCGGCUACAGCUCCGGG | 2342 | CGGAGCUGUAGCCGACGCCGC | 61.1 | 46.1 |
| 1587 | 1099 | GCGUCGGCUACAGCUCCGGGC | 2343 | CCGGAGCUGUAGCCGACGCCG | 61.9 | 46.9 |
| 1588 | 1100 | CGUCGGCUACAGCUCCGGGCG | 2344 | CCCGGAGCUGUAGCCGACGCC | 53.9 | 38.9 |
| 1889 | 1101 | GUCGGCUACAGCUCCGGGCGG | 2345 | GCCCGGAGCUGUAGCCGACGC | 45.7 | 30.7 |
| 1590 | 1102 | UCGGCUACAGCUCCGGGCGGC | 2346 | CGCCCGGAGCUGUAGCCGACG | 46.9 | 31.9 |
| 1591 | 1103 | CGGCUACAGCUCCGGGCGGCC | 2347 | CCGCCCGGAGCUGUAGCCGAC | 54.9 | 39.9 |
| 1592 | 1104 | GGCUACAGCUCCGGGCGGCCA | 2348 | GCCGCCCGGAGCUGUAGCCGA | 54.2 | 39.2 |
| 1593 | 1105 | GCUACAGCUCCGGGCGGCCAC | 2349 | GGCCGCCCGGAGCUGUAGCCG | 51 | 36 |
| 1625 | 1106 | AAACGGCCGCACUGGGACACG | 2350 | UGUCCCAGUGCGGCCGUUUUC | 63 | 47 |
| 1626 | 1107 | AACGGCCGCACUGGGACACGA | 2351 | GUGUCCCAGUGCGGCCGUUUU | 46.3 | 30.3 |
| 1627 | 1108 | ACGGCCGCACUGGGACACGAC | 2352 | CGUGUCCCAGUGCGGCCGUUU | 46.2 | 30.2 |
| 1625 | 1109 | CGGCCGCACUGGGACACGACC | 2353 | UCGUGUCCCAGUGCGGCCGUU | 61.7 | 65.7 |
| 1629 | 1110 | GGCCGCACUGGGACACGACCU | 2354 | GUCGUGUCCCAGUGCGGCCGU | 66.1 | 50.1 |
| 1630 | 1111 | GCCGCACUGGGACACGACCUG | 2355 | GGUCGUGUCCCAGUGCGGCCG | 62.2 | 46.2 |
| 1631 | 1112 | CCGCACUGGGACACGACCUGG | 2356 | AGGUCGUGUCCCAGUGCGGCC | 63.3 | 47.3 |
| 1632 | 1113 | CGCACUGGGACACGACCUGGA | 2357 | CAGGUCGUGUCCCAGUGCGGC | 66.3 | 50.3 |
| 1633 | 1114 | GCACUGGGACACGACCUGGAC | 2358 | CCAGGUCGUGUCCCAGUGCGG | 67.9 | 51.9 |
| 1634 | 1115 | CACUGGGACACGACCUGGACG | 2359 | UCCAGGUCGUGUCCGAGUGCG | 81.8 | 65.8 |
| 1635 | 1116 | ACUGGGACACGACCUGGACGG | 2360 | GUCCAGGUCGUGUCCCAGUGC | 61.1 | 45.1 |
| 1636 | 1117 | CUGGGACACGACCUGGACGGG | 2361 | CGUCCAGGUCGUGUCCCAGUG | 63 | 47 |
| 1637 | 1118 | UGGGACACGACCUGGACGGGC | 2362 | CCGUCCAGGUCGUGUCCCAGU | 54.4 | 38.4 |
| 1638 | 1119 | GGGACACGACCUGGACGGGCA | 2363 | CCCGUCCAGGUCGUGUCCCAG | 63.3 | 47.3 |
| 1639 | 1120 | GGACACGACCUGGACGGGCAG | 2364 | GCCCGUCCAGGUCGUGUCCCA | 55.4 | 39.4 |
| 1640 | 1121 | GACACGACCUGGACGGGCAGG | 2365 | UGCCCGUCCAGGUCGUGUCCC | 74.5 | 58.5 |
| 1641 | 1122 | ACACGACCUGGACGGGCAGGA | 2366 | CUGCCCGUCCAGGUCGUGUCC | 57.4 | 41.4 |
| 1642 | 1123 | CACGACCUGGACGGGCAGGAC | 2367 | CCUGCCCGUCCAGGUCGUGUC | 47.7 | 31.7 |
| 1643 | 1124 | ACGACCUGGACGGGCAGGACG | 2368 | UCCUGCCCGUCCAGGUCGUGU | 66.3 | 50.3 |
| 1644 | 1125 | CGACCUGGACGGGCAGGACGC | 2369 | GUCCUGCCCGUCCAGGUCGUG | 69.4 | 53.4 |
| 1645 | 1126 | GACCUGGACGGGCAGGACGCG | 2370 | CGUCCUGCCCGUCCAGGUCGU | 62 | 46 |
| 1646 | 1127 | ACCUGGACGGGCAGGACGCGG | 2371 | GCGUCCUGCCCGUCCAGGUCG | 52.3 | 36.3 |
| 1647 | 1128 | CCUGGACGGGCAGGACGCGGA | 2372 | CGCGUCCUGCCCGUCCAGGUC | 49.1 | 33.1 |
| 1648 | 1129 | CUGGACGGGCAGGACGCGGAU | 2373 | CCGCGUCCUGCCCGUCCAGGU | 49.1 | 33.1 |
| 1649 | 1130 | UGGACGGGCAGGACGCGGAUG | 2374 | UCCGCGUCCUGCCCGUCCAGG | 68.8 | 52.8 |
| 1650 | 1131 | GGACGGGCAGGACGCGGAUGA | 2375 | AUCCGCGUCCUGCCCGUCCAG | 82.1 | 66.1 |
| 1651 | 1132 | GACGGGCAGGACGCGGAUGAG | 2376 | CAUCCGCGUCCUGCCCGUCCA | 60.5 | 44.5 |
| 1652 | 1133 | ACGGGCAGGACGCGGAUGAGG | 2377 | UCAUCCGCGUCCUGCCCGUCC | 61.8 | 45.8 |
| 1653 | 1134 | CGGGCAGGACGCGGAUGAGGA | 2378 | CUCAUCCGCGUCCUGCCCGUC | 62 | 46 |
| 1654 | 1135 | GGGCAGGACGCGGAUGAGGAU | 2379 | CCUCAUCCGCGUCCUGCCCGU | 61.4 | 45.4 |
| 1655 | 1136 | GGCAGGACGCGGAUGAGGAUG | 2380 | UCCUCAUCCGCGUCCUGCCCG | 81.5 | 65.5 |
| 1656 | 1137 | GCAGGACGCGGAUGAGGAUGC | 2381 | AUCCUCAUCCGCGUCCUGCCC | 76.3 | 60.3 |
| 1657 | 1138 | CAGGACGCGGAUGAGGAUGCC | 2382 | CAUCCUCAUCCGCGUCCUGCC | 54.5 | 38.5 |
| 1658 | 1139 | AGGACGCGGAUGAGGAUGCCA | 2383 | GCAUCCUCAUCCGCGUCCUGC | 54.7 | 38.7 |
| 1059 | 1140 | GGACGCGGAUGAGGAUGCCAG | 2384 | GGCAUCCUCAUCCGCGUCCUG | 64.7 | 48.7 |
| 1692 | 1141 | GGGACAGCAGUAUGCAGAUGA | 2385 | AUCUGCAUACUGCUGUCCCCC | 80.6 | 64.6 |
| 1693 | 1142 | GGACAGCAGUAUGCAGAUGAC | 2386 | CAUCUGCAUACUGCUGUCCCC | 72.5 | 56.5 |
| 1694 | 1143 | GACAGCAGUAUGCAGAUGACU | 2387 | UCAUCUGCAUACUGCUGUCCC | 76.4 | 62.4 |
| 1695 | 1144 | ACAGCAGUAUGCAGAUGACUG | 2388 | GUCAUCUGCAUACUGCUGUCC | 67.7 | 51.7 |
| 1696 | 1145 | CAGCAGUAUGCAGAUGACUGG | 2389 | AGUCAUCUGCAUACUGCUGUC | 74.6 | 58.6 |
| 1697 | 1146 | AGCAGUAUGCAGAUGACUGGA | 2390 | CAGUCAUCUGCAUACUGCUGU | 75.1 | 59.1 |
| 1698 | 1147 | GCAGUAUGCAGAUGACUGGAU | 2391 | CCAGUCAUCUGCAUACUGCUG | 77.4 | 61.4 |
| 1699 | 1148 | CAGUAUGCAGAUGACUGGAUG | 2392 | UCCAGUCAUCUGCAUACUGCU | 82.8 | 66.8 |
| 1700 | 1149 | AGUAUGCAGAUGACUGGAUGG | 2393 | AUCCAGUCAUCUGCAUACUGC | 75.8 | 58.8 |
| 1737 | 1150 | CCCAGCCCGGCCUCCUCGGCC | 2394 | CCGAGGAGGCCGGGCUGGGGG | 49.7 | 32.7 |
| 1738 | 1151 | CCAGCCCGGCCUCCUCGGCCU | 2395 | GCCGAGGAGGCCGGGCUGGGG | 45.9 | 28.9 |
| 1739 | 1152 | CAGCCCGGCCUCCUCGGCCUC | 2396 | GGCCGAGGAGGCCGGGCUGGG | 40.7 | 21.7 |
| 1740 | 1153 | AGCCCGGCCUCCUCGGCCUCC | 2397 | AGGCCGAGGAGGCCGGGCUGG | 61.3 | 44.3 |
| 1741 | 1154 | GCCCGGCCUCCUCGGCCUCCA | 2398 | GAGGCCGAGGAGGCCGGGCUG | 57.4 | 40.4 |
| 1742 | 1155 | CCCGGCCUCCUCGGCCUCCAU | 2399 | GGAGGCCGAGGAGGCCGGGCU | 38.8 | 21.8 |
| 1743 | 1156 | CCGGCCUCCUCGGCCUCCAUA | 2400 | UGGAGGCCGAGGAGGCCGGGC | 61.9 | 44.9 |
| 1744 | 1157 | CGGCCUCCUCGGCCUCCAUAC | 2401 | AUGGAGGCCGAGGAGGCCGGG | 76.2 | 59.2 |
| 1745 | 1158 | GGCCUCCUCGGCCUCCAUACC | 2402 | UAUGGAGGCCGAGGAGGCCGG | 76.6 | 59.6 |
| 1746 | 1159 | GCCUCCUCGGCCUCCAUACCC | 2403 | GUAUGGAGGCCGAGGAGGCCG | 60.5 | 43.5 |
| 1747 | 1160 | CCUCCUCGGCCUCCAUACCCU | 2404 | GGUAUGGAGGCCGAGGAGGCC | 49.3 | 32.3 |
| 1748 | 1161 | CUCCUCGGCCUCCAUACCCUC | 2405 | GGGUAUGGAGGCCGAGGAGGC | 40 | 23 |
| 1749 | 1162 | UCCUCGGCCUCCAUACCCUCC | 2406 | AGGGUAUGGAGGCCGAGGAGG | 59.5 | 42.5 |
| 1750 | 1163 | CCUCGGCCUCCAUACCCUCCU | 2407 | GAGGGUAUGGAGGCCGAGGAG | 63.5 | 46.5 |
| 1751 | 1164 | CUCGGCCUCCAUACCCUCCUA | 2408 | GGAGGGUAUGGAGGCCGAGGA | 48.1 | 31.1 |
| 1752 | 1165 | UCGGCCUCCAUACCCUCCUAG | 2409 | AGGAGGGUAUGGAGGCCGAGG | 55.6 | 38.6 |
| 1753 | 1166 | CGGCCUCCAUACCCUCCUAGA | 2410 | UAGGAGGGUAUGGAGGCCGAG | 88.9 | 71.9 |
| 1754 | 1167 | GGCCUCCAUACCCUCCUAGAA | 2411 | CUAGGAGGGUAUGGAGGCCGA | 63.7 | 46.7 |
| 1755 | 1168 | GCCUCCAUACCCUCCUAGAAG | 2412 | UCUAGGAGGGUAUGGAGGCCG | 81.7 | 64.7 |
| 1756 | 1169 | CCUCCAUACCCUCCUAGAAGG | 2413 | UUCUAGGAGGGUAUGGAGGCC | 81.5 | 64.5 |
| 1757 | 1170 | CUCCAUACCCUCCUAGAAGGG | 2414 | CUUCUAGGAGGGUAUGGAGGC | 60.2 | 43.2 |
| 1758 | 1171 | UCCAUACCCUCCUAGAAGGGA | 2415 | CCUUCUAGGAGGGUAUGGAGG | 58.9 | 41.9 |
| 1759 | 1172 | CCAUACCCUCCUAGAAGGGAU | 2416 | CCCUUCUAGGAGGGUAUGGAG | 59 | 42 |
| 1760 | 1173 | CAUACCCUCCUAGAAGGGAUG | 2417 | UCCCUUCUAGGAGGGUAUGGA | 71.2 | 54.2 |
| 1761 | 1174 | AUACCCUCCUAGAAGGGAUGG | 2418 | AUCCCUUCUAGGAGGGUAUGG | 73.4 | 56.4 |
| 1762 | 1175 | UACCCUCCUAGAAGGGAUGGU | 2419 | CAUCCCUUCUAGGAGGGUAUG | 61 | 44 |
| 1763 | 1176 | ACCCUCCUAGAAGGGAUGGUU | 2420 | CCAUCCCUUCUAGGAGGGUAU | 50.2 | 33.2 |
| 1764 | 1177 | CCCUCCUAGAAGGGAUGGUUC | 2421 | ACCAUCCCUUCUAGGAGGGUA | 68.6 | 51.6 |
| 1765 | 1178 | CCUCCUAGAAGGGAUGGUUCU | 2422 | AACCAUCCCUUCUAGGAGGGU | 80 | 63 |
| 1766 | 1179 | CUCCUAGAAGGGAUGGUUCUG | 2423 | GAACCAUCCCUUCUAGGAGGG | 68.3 | 51.3 |
| 1767 | 1180 | UCCUAGAAGGGAUGGUUCUGG | 2424 | AGAACCAUCCCUUCUAGGAGG | 73.5 | 56.5 |
| 1768 | 1181 | CCUAGAAGGGAUGGUUCUGGG | 2425 | CAGAACCAUCCCUUCUAGGAG | 72.6 | 55.6 |
| 1804 | 1182 | GGCAGUGCCCGCUACAACCAG | 2426 | GGUUGUAGCGGGCACUGCCAC | 60 | 42 |
| 1805 | 1183 | GCAGUGCCCGCUACAACCAGG | 2427 | UGGUUGUAGCGGGCACUGCCA | 79.5 | 61.5 |
| 1806 | 1184 | CAGUGCCCGCUACAACCAGGG | 2428 | CUGGUUGUAGCGGGCACUGCC | 59.4 | 41.4 |
| 1807 | 1185 | AGUGCCCGCUACAACCAGGGC | 2429 | CCUGGUUGUAGCGGGCACUGC | 56 | 38 |
| 1808 | 1186 | GUGCCCGCUACAACCAGGGCC | 2430 | CCCUGGUUGUAGCGGGCACUG | 53.7 | 35.7 |
| 1809 | 1187 | UGCCCGCUACAACCAGGGCCG | 2431 | GCCCUGGUUGUAGCGGGCACU | 44.1 | 26.1 |
| 1810 | 1188 | GCCCGCUACAACCAGGGCCGG | 2432 | GGCCCUGGUUGUAGCGGGCAC | 43 | 25 |
| 1811 | 1189 | CCCGCUACAACCAGGGCCGGA | 2433 | CGGCCCUGGUUGUAGCGGGCA | 52.2 | 34.2 |
| 1812 | 1190 | CCGCUACAACCAGGGCCGGAG | 2434 | CCGGCCCUGGUUGUAGCGGGC | 47.8 | 29.8 |
| 1813 | 1191 | CGCUACAACCAGGGCCGGAGC | 2435 | UCCGGCCCUGGUUGUAGCGGG | 71.9 | 53.9 |
| 1814 | 1192 | GCUACAACCAGGGCCGGAGCA | 2436 | CUCCGGCCCUGGUUGUAGCGG | 62.6 | 44.6 |
| 1815 | 1193 | CUACAACCAGGGCCGGAGCAG | 2437 | GCUCCGGCCCUGGUUGUAGCG | 50.9 | 32.9 |
| 1816 | 1194 | UACAACCAGGGCCGGAGCAGG | 2438 | UGCUCCGGCCCUGGUUGUAGC | 50.2 | 32.2 |
| 1817 | 1195 | ACAACCAGGGCCGGAGCAGGA | 2439 | CUGCUCCGGCCCUGGUUGUAG | 50.3 | 32.3 |
| 1818 | 1196 | CAACCAGGGCCGGAGCAGGAG | 2440 | CCUGCUCCGGCCCUGGUUGUA | 54 | 36 |
| 1819 | 1197 | AACCAGGGCCGGAGCAGGAGU | 2441 | UCCUGCUCCGGCCCUGGUUGU | 65.5 | 47.5 |
| 1820 | 1198 | ACCAGGGCCGGAGCAGGAGUG | 2442 | CUCCUGCUCCGGCCCUGGUUG | 52.7 | 34.7 |
| 1821 | 1199 | CCAGGGCCGGAGCAGGAGUGG | 2443 | ACUCCUGCUCCGGCCCUGGUU | 68.3 | 50.3 |
| 1822 | 1200 | CAGGGCCGGAGCAGGAGUGGG | 2444 | CACUCCUGCUCCGGCCCUGGU | 57.3 | 39.3 |
| 1858 | 1201 | UUUCACACCCAAACCAUCCUC | 2445 | GGAUGGUUUGGGUGUGAAAAC | 36.4 | 18.4 |
| 1859 | 1202 | UUCACACCCAAACCAUCCUCA | 2446 | AGGAUGGUUUGGGUGUGAAAA | 56.8 | 38.8 |
| 1860 | 1203 | UCACACCCAAACCAUCCUCAU | 2447 | GAGGAUGGUUUGGGUGUGAAA | 50.9 | 32.9 |
| 1861 | 1204 | CACACCCAAACCAUCCUCAUU | 2448 | UGAGGAUGGUUUGGGUGUGAA | 71.6 | 53.6 |
| 1862 | 1205 | ACACCCAAACCAUCCUCAUUC | 2449 | AUGAGGAUGGUUUGGGUGUGA | 74.3 | 56.3 |
| 1863 | 1206 | CACCCAAACCAUCCUCAUUCU | 2450 | AAUGAGGAUGGUUUGGGUGUG | 80.4 | 62.4 |
| 1864 | 1207 | ACCCAAACCAUCCUCAUUCUC | 2451 | GAAUGAGGAUGGUUUGGGUGU | 57.7 | 39.7 |
| 1865 | 1208 | CCCAAACCAUCCUCAUUCUCU | 2452 | AGAAUGAGGAUGGUUUGGGUG | 78 | 60 |
| 1866 | 1209 | CCAAACCAUCCUCAUUCUCUC | 2453 | GAGAAUGAGGAUGGUUUGGGU | 65.4 | 47.4 |
| 1867 | 1210 | CAAACCAUCCUCAUUCUCUCC | 2454 | AGAGAAUGAGGAUGGUUUGGG | 70.5 | 52.5 |
| 1868 | 1211 | AAACCAUCCUCAUUCUCUCCC | 2455 | GAGAGAAUGAGGAUGGUUUGG | 66.7 | 48.7 |
| 1869 | 1212 | AACCAUCCUCAUUCUCUCCCU | 2456 | GGAGAGAAUGAGGAUGGUUUG | 57.3 | 39.3 |
| 1870 | 1213 | ACCAUCCUCAUUCUCUCCCUC | 2457 | GGGAGAGAAUGAGGAUGGUUU | 46.4 | 28.4 |
| 1871 | 1214 | CCAUCCUCAUUCUCUCCCUCU | 2458 | AGGGAGAGAAUGAGGAUGGUU | 72.8 | 54.8 |
| 1872 | 1215 | CAUCCUCAUUCUCUCCCUCUC | 2459 | GAGGGAGAGAAUGAGGAUGGU | 66.2 | 48.2 |
| 1873 | 1216 | AUCCUCAUUCUCUCCCUCUCA | 2460 | AGAGGGAGAGAAUGAGGAUGG | 61 | 43 |
| 1874 | 1217 | UCCUCAUUCUCUCCCUCUCAG | 2461 | GAGAGGGAGAGAAUGAGGAUG | 64 | 46 |
| 1875 | 1218 | CCUCAUUCUCUCCCUCUCAGC | 2462 | UGAGAGGGAGAGAAUGAGGAU | 81.7 | 63.7 |
| 1876 | 1219 | CUCAUUCUCUCCCUCUCAGCC | 2463 | CUGAGAGGGAGAGAAUGAGGA | 66.7 | 48.7 |
| 1877 | 1220 | UCAUUCUCUCCCUCUCAGCCC | 2464 | GCUGAGAGGGAGAGAAUGAGG | 52.2 | 34.2 |
| 1878 | 1221 | CAUUCUCUCCCUCUCAGCCCU | 2465 | GGCUGAGAGGGAGAGAAUGAG | 56.3 | 38.3 |
| 1879 | 1222 | AUUCUCUCCCUCUCAGCCCUG | 2466 | GGGCUGAGAGGGAGAGAAUGA | 44 | 26 |
| 1880 | 1223 | UUCUCUCCCUCUCAGCCCUGG | 2467 | AGGGCUGAGAGGGAGAGAAUG | 60 | 42 |
| 1899 | 1224 | GGCCCUGCUUGGACCUCGAUA | 2468 | UCGAGGUCCAAGCAGGGCCAG | 89.2 | 71.2 |
| 1900 | 1225 | GCCCUGCUUGGACCUCGAUAA | 2469 | AUCGAGGUCCAAGCAGGGCCA | 78.2 | 59.2 |
| 1901 | 1226 | CCCUGCUUGGACCUCGAUAAC | 2470 | UAUCGAGGUCCAAGCAGGGCC | 77.8 | 58.8 |
| 1902 | 1227 | CCUGCUUGGACCUCGAUAACG | 2471 | UUAUCGAGGUCCAAGCAGGGC | 88.4 | 69.4 |
| 1903 | 1228 | CUGCUUGGACCUGGAUAACGG | 2472 | GUUAUCGAGGUCCAAGCAGGG | 72.3 | 53.3 |
| 1904 | 1229 | UGCUUGGACCUCGAUAACGGG | 2473 | CGUUAUCGAGGUCCAAGCAGG | 59.1 | 40.1 |
| 1929 | 1230 | GGGUGCCCUAGCAUCAGAAGG | 2474 | UUCUGAUGCUAGGGCACCCCU | 83.4 | 64.4 |
| 1930 | 1231 | GGUGCCCUAGCAUCAGAAGGG | 2475 | CUUCUGAUGCUAGGGCACCCC | 66.1 | 47.1 |
| 1931 | 1232 | GUGCCCUAGCAUCAGAAGGGU | 2476 | CCUUCUGAUGCUAGGGCACCC | 54.8 | 35.8 |
| 1932 | 1233 | UGCCCUAGCAUCAGAAGGGUU | 2477 | CCCUUCUGAUGCUAGGGCACC | 44.4 | 25.4 |
| 1933 | 1234 | GCCCUAGCAUCAGAAGGGUUC | 2478 | ACCCUUCUGAUGCUAGGGCAC | 65.7 | 46.7 |
| 1934 | 1235 | CCCUAGCAUCAGAAGGGUUCA | 2479 | AACCCUUCUGAUGCUAGGGCA | 79.8 | 60.8 |
| 1935 | 1236 | CCUAGCAUCAGAAGGGUUCAU | 2480 | GAACCCUUCUGAUGCUAGGGC | 63.1 | 44.1 |
| 1936 | 1237 | CUAGCAUCAGAAGGGUUCAUG | 2481 | UGAACCCUUCUGAUGCUAGGG | 84.6 | 65.6 |
| 1937 | 1238 | UAGCAUCAGAAGGGUUCAUGG | 2482 | AUGAACCCUUCUGAUGCUAGG | 72.2 | 53.2 |
| 2006 | 1239 | GGGCUGCAGAGAGGGUAGAGA | 2483 | UCUACCCUCUCUGCAGCCCCC | 73.3 | 53.3 |
| 2007 | 1240 | GGCUGCAGAGAGGGUAGAGAA | 2484 | CUCUACCCUCUCUGCAGCCCC | 60.5 | 40.5 |
| 2008 | 1241 | GCUGCAGAGAGGGUAGAGAAG | 2485 | UCUCUACCCUCUCUGCAGCCC | 75.2 | 55.2 |
| 2009 | 1242 | CUGCAGAGAGGGUAGAGAAGG | 2486 | UUCUCUACCCUCUCUGCAGCC | 80.6 | 60.6 |
| 2010 | 1243 | UGCAGAGAGGGUAGAGAAGGG | 2487 | CUUCUCUACCCUCUCUGCAGC | 62.7 | 42.7 |
| 2011 | 1244 | GCAGAGAGGGUAGAGAAGGGA | 2488 | CCUUCUCUACCCUCUCUGCAG | 67.6 | 47.6 |
| 2012 | 1245 | CAGAGAGGGUAGAGAAGGGAC | 2489 | CCCUUCUCUACCCUCUCUGCA | 64.4 | 44.4 |
| 2013 | 1246 | AGAGAGGGUAGAGAAGGGACU | 2490 | UCCCUUCUCUACCCUCUCUGC | 70.2 | 50.2 |
| 2014 | 1247 | GAGAGGGUAGAGAAGGGACUU | 2491 | GUCCCUUCUCUACCCUCUCUG | 71.7 | 51.7 |
| 2015 | 1248 | AGAGGGUAGAGAAGGGACUUU | 2492 | AGUCCCUUCUCUACCCUCUCU | 72.8 | 52.8 |
| 2016 | 1249 | GAGGGUAGAGAAGGGACUUUG | 2493 | AAGUCCCUUCUCUACCCUCUC | 73.6 | 53.6 |
| 2017 | 1250 | AGGGUAGAGAAGGGACUUUGC | 2494 | AAAGUCCCUUCUCUACCCUCU | 71.3 | 51.3 |
| 2018 | 1251 | GGGUAGAGAAGGGACUUUGCA | 2495 | CAAAGUCCCUUCUCUACCCUC | 69.2 | 49.2 |
| 2019 | 1252 | GGUAGAGAAGGGACUUUGCAG | 2496 | GCAAAGUCCCUUCUCUACCCU | 70.7 | 50.7 |
| 2020 | 1253 | GUAGAGAAGGGACUUUGCAGG | 2497 | UGCAAAGUCCCUUCUCUACCC | 72.2 | 52.2 |
| 2021 | 1254 | UAGAGAAGGGACUUUGCAGGU | 2498 | CUGCAAAGUCCCUUCUCUACC | 52.8 | 32.8 |
| 2022 | 1255 | AGAGAAGGGACUUUGCAGGUG | 2499 | CCUGCAAAGUCCCUUCUCUAC | 54.7 | 34.7 |
| 2023 | 1256 | GAGAAGGGACUUUGCAGGUGA | 2500 | ACCUGCAAAGUCCCUUCUCUA | 74.3 | 54.3 |
| 2024 | 1257 | AGAAGGGACUUUGCAGGUGAA | 2501 | CACCUGCAAAGUCCCUUCUCU | 62.1 | 42.1 |
| 2025 | 1258 | GAAGGGACUUUGCAGGUGAAU | 2502 | UCACCUGCAAAGUCCCUUCUC | 81 | 61 |
| 2026 | 1259 | AAGGGACUUUGCAGGUGAAUG | 2503 | UUCACCUGCAAAGUCCCUUCU | 82.9 | 62.9 |
| 2027 | 1260 | AGGGACUUUGCAGGUGAAUGG | 2504 | AUUCACCUGCAAAGUCCCUUC | 66.8 | 46.8 |
| 2071 | 1261 | UUUCAUCAGAGGUGGGUGGGU | 2505 | CCACCCACCUCUGAUGAAAAU | 47.7 | 27.7 |
| 2072 | 1262 | UUCAUCAGAGGUGGGUGGGUG | 2506 | CCCACCCACCUCUGAUGAAAA | 35.6 | 15.6 |
| 2073 | 1263 | UCAUCAGAGGUGGGUGGGUGU | 2507 | ACCCACCCACCUCUGAUGAAA | 55 | 35 |
| 2074 | 1264 | CAUCAGAGGUGGGUGGGUGUU | 2508 | CACCCACCCACCUCUGAUGAA | 59.8 | 39.8 |
| 2075 | 1265 | AUCAGAGGUGGGUGGGUGUUC | 2509 | ACACCCACCCACCUCUGAUGA | 64.5 | 44.5 |
| 2076 | 1266 | UCAGAGGUGGGUGGGUGUUCA | 2510 | AACACCCACCCACCUCUGAUG | 68.4 | 48.4 |
| 2077 | 1267 | CAGAGGUGGGUGGGUGUUCAC | 2511 | GAACACCCACCCACCUCUGAU | 63.2 | 43.2 |
| 2078 | 1268 | AGAGGUGGGUGGGUGUUCACA | 2512 | UGAACACCCACCCACCUCUGA | 81.5 | 61.5 |
| 2079 | 1289 | GAGGUGGGUGGGUGUUCACAA | 2513 | GUGAACACCCACCCACCUCUG | 73.4 | 53.4 |
| 2080 | 1270 | AGGUGGGUGGGUGUUCACAAU | 2514 | UGUGAACACCCACCCACCUCU | 74 | 54 |
| 2081 | 1271 | GGUGGGUGGGUGUUCACAAUA | 2515 | UUGUGAACACCCACCCACCUC | 89.9 | 69.9 |
| 2082 | 1272 | GUGGGUGGGUGUUCACAAUAU | 2516 | AUUGUGAACACCCACCCACCU | 83.7 | 63.7 |
| 2083 | 1273 | UGGGUGGGUGUUCACAAUAUU | 2517 | UAUUGUGAACACCCACCCACC | 74.1 | 54.1 |
| 2084 | 1274 | GGGUGGGUGUUCACAAUAUUU | 2518 | AUAUUGUGAACACCCACCCAC | 87.2 | 67.2 |
| 2085 | 1275 | GGUGGGUGUUCACAAUAUUUA | 2519 | AAUAUUGUGAACACCCACCCA | 96.5 | 76.5 |
| 2086 | 1276 | GUGGGUGUUCACAAUAUUUAU | 2520 | AAAUAUUGUGAACACCCACCC | 79.8 | 59.8 |
| 2087 | 1277 | UGGGUGUUCACAAUAUUUAUU | 2521 | UAAAUAUUGUGAACACCCACC | 78.4 | 58.4 |
| 2088 | 1278 | GGGUGUUCACAAUAUUUAUUU | 2522 | AUAAAUAUUGUGAACACCCAC | 93.3 | 73.3 |
| 2109 | 1279 | UUUCAUUUGGUAAUGGGAGGG | 2523 | CUCCCAUUACCAAAUGAAAAA | 48.7 | 27.7 |
| 2138 | 1280 | GGGUAUUUAUUUAGGAGGGAG | 2524 | CCCUCCUAAAUAAAUACCCCC | 57.6 | 36.6 |
| 2139 | 1281 | GGUAUUUAUUUAGGAGGGAGU | 2525 | UCCCUCCUAAAUAAAUACCCC | 71.9 | 50.9 |
| 2140 | 1282 | GUAUUUAUUUAGGAGGGAGUG | 2526 | CUCCCUCCUAAAUAAAUACCC | 54.9 | 33.9 |
| 2141 | 1283 | UAUUUAUUUAGGAGGGAGUGU | 2527 | ACUCCCUCCUAAAUAAAUACC | 53.4 | 32.4 |
| 2142 | 1284 | AUUUAUUUAGGAGGGAGUGUG | 2528 | CACUCCCUCCUAAAUAAAUAC | 47.6 | 26.6 |
| 2143 | 1285 | UUUAUUUAGGAGGGAGUGUGG | 2529 | ACACUCCCUCCUAAAUAAAUA | 55.8 | 34.8 |
| 2144 | 1286 | UUAUUUAGGAGGGAGUGUGGU | 2530 | CACACUCCCUCCUAAAUAAAU | 50.4 | 29.4 |
| 2145 | 1287 | UAUUUAGGAGGGAGUGUGGUU | 2531 | CCACACUCCCUCCUAAAUAAA | 53 | 32 |
| 2146 | 1288 | AUUUAGGAGGGAGUGUGGUUU | 2532 | ACCACACUCCCUCCUAAAUAA | 58.1 | 37.1 |
| 2147 | 1289 | UUUAGGAGGGAGUGUGGUUUC | 2533 | AACCACACUCCCUCCUAAAUA | 65.9 | 44.9 |
| 2148 | 1290 | UUAGGAGGGAGUGUGGUUUCC | 2534 | AAACCACACUCCCUCCUAAAU | 60.8 | 39.8 |
| 2149 | 1291 | UAGGAGGGAGUGUGGUUUCCU | 2535 | GAAACCACACUCCCUCCUAAA | 59 | 38 |
| 2150 | 1292 | AGGAGGGAGUGUGGUUUCCUU | 2536 | GGAAACCACACUCCCUCCUAA | 61.2 | 40.2 |
| 2151 | 1293 | GGAGGGAGUGUGGUUUCCUUA | 2537 | AGGAAACCACACUCCCUCCUA | 76.7 | 55.7 |
| 2152 | 1294 | GAGGGAGUGUGGUUUCCUUAG | 2538 | AAGGAAACCACACUCCCUCCU | 83 | 62 |
| 2153 | 1295 | AGGGAGUGUGGUUUCCUUAGA | 2539 | UAAGGAAACCACACUCCCUCC | 79.6 | 58.6 |
| 2154 | 1296 | GGGAGUGUGGUUUCCUUAGAA | 2540 | CUAAGGAAACCACACUCCCUC | 74.3 | 53.3 |
| 2155 | 1297 | GGAGUGUGGUUUCCUUAGAAG | 2541 | UCUAAGGAAACCACACUCCCU | 94.3 | 73.3 |
| 2156 | 1298 | GAGUGUGGUUUCCUUAGAAGG | 2542 | UUGUAAGGAAACCACACUCCC | 88.3 | 67.3 |
| 2157 | 1299 | AGUGUGGUUUCCUUAGAAGGU | 2543 | CUUCUAAGGAAACCACACUCC | 68.6 | 47.6 |
| 2158 | 1300 | GUGUGGUUUCCUUAGAAGGUA | 2544 | CCUUCUAAGGAAACCACACUC | 67.8 | 46.8 |
| 2159 | 1301 | UGUGGUUUCCUUAGAAGGUAU | 2545 | ACCUUCUAAGGAAACCACACU | 71.6 | 50.6 |
| 2160 | 1302 | GUGGUUUCCUUAGAAGGUAUA | 2546 | UACCUUCUAAGGAAACCACAC | 81.1 | 60.1 |
| 2161 | 1303 | UGGUUUCCUUAGAAGGUAUAG | 2547 | AUACCUUCUAAGGAAACCACA | 80.6 | 59.6 |
| 2162 | 1304 | GGUUUCCUUAGAAGGUAUAGU | 2548 | UAUACCUUCUAAGGAAACCAC | 88.3 | 67.3 |
| 2163 | 1305 | GUUUCCUUAGAAGGUAUAGUC | 2549 | CUAUACCUUCUAAGGAAACCA | 67.3 | 46.3 |
| 2164 | 1306 | UUUCCUUAGAAGGUAUAGUCU | 2550 | ACUAUACCUUCUAAGGAAACC | 53.6 | 32.6 |
| 2165 | 1307 | UUCCUUAGAAGGUAUAGUCUC | 2551 | GACUAUACCUUCUAAGGAAAC | 51.5 | 30.5 |
| 2166 | 1308 | UCCUUAGAAGGUAUAGUCUCU | 2552 | AGACUAUACCUUCUAAGGAAA | 68.5 | 47.5 |
| 2167 | 1309 | CCUUAGAAGGUAUAGUCUCUA | 2553 | GAGACUAUACCUUCUAAGGAA | 75.3 | 54.3 |
| 2168 | 1310 | CUUAGAAGGUAUAGUCUCUAG | 2554 | AGAGACUAUACCUUCUAAGGA | 81.1 | 60.1 |
| 2169 | 1311 | UUAGAAGGUAUAGUCUCUAGG | 2555 | UAGAGACUAUACCUUCUAAGG | 76.8 | 55.8 |
| 2170 | 1312 | UAGAAGGUAUAGUCUCUAGCC | 2556 | CUAGAGACUAUACCUUCUAAG | 72.1 | 51.1 |
| 2171 | 1313 | AGAAGGUAUAGUCUCUAGCCC | 2557 | GCUAGAGACUAUACCUUCUAA | 67.9 | 46.9 |
| 2172 | 1314 | GAAGGUAUAGUCUCUAGCCCU | 2558 | GGCUAGAGACUAUACCUUCUA | 66.9 | 45.9 |
| 2173 | 1315 | AAGGUAUAGUCUCUAGCCCUC | 2559 | GGGCUAGAGACUAUACCUUCU | 56.4 | 35.4 |
| 2174 | 1316 | AGGUAUAGUCUCUAGCCCUCU | 2560 | AGGGCUAGAGACUAUACCUUC | 70.8 | 49.8 |
| 2175 | 1317 | GGUAUAGUCUCUAGCCCUCUA | 2561 | GAGGGCUAGAGACUAUACCUU | 76.1 | 55.1 |
| 2176 | 1318 | GUAUAGUCUCUAGCCCUCUAA | 2562 | AGAGGGCUAGAGACUAUACCU | 69.1 | 48.1 |
| 2177 | 1319 | UAUAGUCUCUAGCCCUCUAAG | 2563 | UAGAGGGCUAGAGACUAUACC | 74.9 | 53.9 |
| 2178 | 1320 | AUAGUCUCUAGCCCUCUAAGG | 2564 | UUAGAGGGCUAGAGACUAUAC | 71.3 | 50.3 |
| 2179 | 1321 | UAGUCUCUAGCCCUCUAAGGC | 2565 | CUUAGAGGGCUAGAGACUAUA | 63.7 | 42.7 |
| 2180 | 1322 | AGUCUCUAGCCCUCUAAGGCU | 2566 | CCUUAGAGGGCUAGAGACUAU | 61.3 | 40.3 |
| 2181 | 1323 | GUCUCUAGCCCUCUAAGGCUG | 2567 | GCCUUAGAGGGCUAGAGACUA | 57.6 | 36.6 |
| 2182 | 1324 | UCUCUAGCCCUCUAAGGCUGG | 2568 | AGCCUUAGAGGGCUAGAGACU | 59.5 | 38.5 |
| 2183 | 1325 | CUCUAGCCCUCUAAGGCUGGG | 2569 | CAGCCUUAGAGGGCUAGAGAC | 60.5 | 39.5 |
| 2228 | 1326 | AAAUGAGGAGUUUAGAGUUGC | 2570 | AACUCUAAACUCCUCAUUUUC | 76.1 | 54.1 |
| 2229 | 1327 | AAUGAGGAGUUUAGAGUUGCA | 2571 | CAACUCUAAACUCCUCAUUUU | 73.9 | 51.9 |
| 2230 | 1328 | AUGAGGAGUUUAGAGUUGCAG | 2572 | GCAACUCUAAACUCCUCAUUU | 62.3 | 40.3 |
| 2231 | 1329 | UGAGGAGUUUAGAGUUGCAGC | 2573 | UGCAACUCUAAACUCCUCAUU | 86.6 | 64.6 |
| 2232 | 1330 | GAGGAGUUUAGAGUUGCAGCU | 2574 | CUGCAACUCUAAACUCCUCAU | 73.3 | 51.3 |
| 2233 | 1331 | AGGAGUUUAGAGUUGCAGCUG | 2575 | GCUGCAACUCUAAACUCCUCA | 66.2 | 44.2 |
| 2234 | 1332 | GGAGUUUAGAGUUGCAGCUGG | 2576 | AGCUGCAACUCUAAACUCCUC | 81.6 | 59.6 |
| 2235 | 1333 | GAGUUUAGAGUUGCAGCUGGG | 2577 | CAGCUGCAACUCUAAACUCCU | 72.1 | 50.1 |
| 2260 | 1334 | GGGUUUGAAGGAAGUUGGAAG | 2578 | UCCAACUUCCUUCAAACCCCU | 88.3 | 55.3 |
| 2261 | 1335 | GGUUUGAAGGAAGUUGGAAGU | 2579 | UUCCAACUUCCUUCAAACCCC | 83.2 | 61.2 |
| 2262 | 1335 | GGUUUGAAGGAAGUUGGAAGU | 2550 | CUUCCAACUUCCUUCAAACCC | 65.5 | 43.5 |
| 2263 | 1337 | UUUGAAGGAAGUUGGAAGUGG | 2581 | ACUUCCAACUUCCUUCAAACC | 56.7 | 34.7 |
| 2264 | 1338 | UUGAAGGAAGUUGGAAGUGGG | 2582 | CACUUCCAACUUCCUUCAAAC | 47.3 | 25.3 |
| 2294 | 1339 | GGGCAUCUGGUCUCAGAAAUG | 2583 | UUUCUGAGACCAGAUGCCCCC | 82.2 | 60.2 |
| 2295 | 1340 | GGCAUCUGGUCUCAGAAAUGG | 2584 | AUUUCUGAGACCAGAUGCCCC | 77.6 | 55.6 |
| 2296 | 1341 | GCAUCUGGUCUCAGAAAUGGA | 2585 | CAUUUCUGAGACCAGAUGCCC | 69.2 | 47.2 |
| 2297 | 1342 | CAUCUGGUCUCAGAAAUGGAC | 2586 | CCAUUUCUGAGACCAGAUGCC | 58.3 | 36.3 |
| 2298 | 1343 | AUCUGGUCUCAGAAAUGGACC | 2587 | UCCAUUUCUGAGACCAGAUGC | 74.3 | 52.3 |
| 2299 | 1344 | UCUGGUCUCAGAAAUGGACCA | 2588 | GUCCAUUUCUGAGACCAGAUG | 65.3 | 43.3 |
| 2300 | 1345 | CUGGUCUCAGAAAUGGACCAG | 2589 | GGUCCAUUUCUGAGACCAGAU | 56.3 | 33.3 |
| 2301 | 1346 | UGGUCUCAGAAAUGGACCAGC | 2590 | UGGUCCAUUUCUGAGACCAGA | 79.3 | 56.3 |
| 2302 | 1347 | GGUCUCAGAAAUGGACCAGCU | 2591 | CUGGUCCAUUUCUGAGACCAG | 71.2 | 48.2 |
| 2303 | 1348 | GUCUCAGAAAUGGACCAGCUG | 2592 | GCUGGUCCAUUUCUGAGACCA | 58 | 35 |
| 2304 | 1349 | UCUCAGAAAUGGACCAGCUGG | 2593 | AGCUGGUCCAUUUCUGAGACC | 62.6 | 39.6 |
| 2305 | 1350 | CUCAGAAAUGGACCAGCUGGA | 2594 | CAGCUGGUCCAUUUCUGAGAC | 63.7 | 40.7 |
| 2306 | 1351 | UCAGAAAUGGACCAGCUGGAU | 2595 | CCAGCUGGUCCAUUUCUGAGA | 59.7 | 36.7 |
| 2307 | 1352 | CAGAAAUGGACCAGCUGGAUG | 2596 | UCCAGCUGGUCCAUUUCUGAG | 84 | 61 |
| 2308 | 1353 | AGAAAUGGACCAGCUGGAUGC | 2597 | AUCCAGCUGGUCCAUUUCUGA | 77.5 | 54.5 |
| 2309 | 1354 | GAAAUGGACCAGCUGGAUGCA | 2598 | CAUCCAGCUGGUCCAUUUCUG | 72.6 | 49.6 |
| 2310 | 1355 | AAAUGGACCAGCUGGAUGCAG | 2599 | GCAUCCAGCUGGUCCAUUUCU | 58 | 35 |
| 2311 | 1356 | AAUGGACCAGCUGGAUGCAGG | 2600 | UGCAUCCAGCUGGUCCAUUUC | 69.3 | 46.3 |
| 2312 | 1357 | AUGGACCAGCUGGAUGCAGGG | 2601 | CUGCAUCCAGCUGGUCCAUUU | 57.4 | 34.4 |
| 2313 | 1358 | UGGACCAGCUGGAUGCAGGGC | 2602 | CCUGCAUCCAGCUGGUCCAUU | 57.9 | 34.9 |
| 2314 | 1359 | GGACCAGCUGGAUGCAGGGCA | 2603 | CCCUGCAUCCAGCUGGUCCAU | 67.8 | 44.8 |
| 2315 | 1360 | GACCAGCUGGAUGCAGGGCAG | 2604 | GCCCUGCAUCCAGCUGGUCCA | 51.3 | 28.3 |
| 2316 | 1361 | ACCAGCUGGAUGCAGGGCAGG | 2605 | UGCCCUGCAUCCAGCUGGUCC | 59.1 | 36.1 |
| 2317 | 1362 | CCAGCUGGAUGCAGGGCAGGG | 2606 | CUGCCCUGCAUCCAGCUGGUC | 66.2 | 43.2 |
| 2336 | 1363 | GGGACUGAGGGUGCUUGAGUA | 2607 | CUCAAGCACCCUCAGUCCCCU | 64.8 | 41.8 |
| 2337 | 1364 | GGACUGAGGGUGCUUGAGUAG | 2608 | ACUCAAGCACCCUCAGUCCCC | 67.6 | 44.6 |
| 2338 | 1365 | GACUGAGGGUGCUUGAGUAGG | 2609 | UACUCAAGCACCCUCAGUCCC | 81.7 | 58.7 |
| 2339 | 1366 | ACUGAGGGUGCUUGAGUAGGA | 2610 | CUACUCAAGCACCCUCAGUCC | 57.9 | 34.9 |
| 2340 | 1367 | CUGAGGGUGCUUGAGUAGGAU | 2611 | CCUACUCAAGCACCCUCAGUC | 52.4 | 29.4 |
| 2341 | 1365 | UGAGGGUGCUUGAGUAGGAUG | 2612 | UCCUACUCAAGCACCCUCAGU | 76.8 | 53.8 |
| 2342 | 1369 | GAGGGUGCUUGAGUAGGAUGU | 2613 | AUCCUACUCAAGCACCCUCAG | 80.6 | 57.6 |
| 2343 | 1370 | AGGGUGCUUGAGUAGGAUGUG | 2614 | CAUCCUACUCAAGCACCCUCA | 67.1 | 44.1 |
| 2344 | 1371 | GGGUGCUUGAGUAGGAUGUGA | 2615 | ACAUCCUACUCAAGCACCCUC | 76.7 | 53.7 |
| 2345 | 1372 | GGUGCUUGAGUAGGAUGUGAG | 2616 | CACAUCCUACUCAAGCACCCU | 75.4 | 52.4 |
| 2346 | 1373 | GUGCUUGAGUAGGAUGUGAGA | 2617 | UCACAUCCUACUCAAGCACCC | 77.5 | 54.5 |
| 2347 | 1374 | UGCUUGAGUAGGAUGUGAGAC | 2618 | CUCACAUCCUACUCAAGCACC | 57.7 | 34.7 |
| 2348 | 1375 | GCUUGAGUAGGAUGUGAGACU | 2619 | UCUCACAUCCUACUCAAGCAC | 86.9 | 63.9 |
| 2349 | 1376 | CUUGAGUAGGAUGUGAGACUU | 2620 | GUCUCACAUCCUACUCAAGCA | 62.2 | 39.2 |
| 2350 | 1377 | UUGAGUAGGAUGUGAGACUUC | 2621 | AGUCUCACAUCCUACUCAAGC | 60.7 | 37.7 |
| 2351 | 1378 | UGAGUAGGAUGUGAGACUUCA | 2622 | AAGUCUCACAUCCUACUCAAG | 80.4 | 57.4 |
| 2352 | 1379 | GAGUAGGAUGUGAGACUUCAU | 2623 | GAAGUCUCACAUCCUACUCAA | 76.7 | 53.7 |
| 2353 | 1380 | AGUAGGAUGUGAGACUUCAUG | 2624 | UGAAGUCUCACAUCCUACUCA | 88.9 | 65.9 |
| 2354 | 1381 | GUAGGAUGUGAGACUUCAUGG | 2625 | AUGAAGUCUCACAUCCUACUC | 85.4 | 62.4 |
| 2355 | 1382 | UAGGAUGUGAGACUUCAUGGG | 2626 | CAUGAAGUCUCACAUCCUACU | 62.3 | 39.3 |
| 2356 | 1383 | AGGAUGUGAGACUUCAUGGGC | 2627 | CCAUGAAGUCUCACAUCCUAC | 61.7 | 38.7 |
| 2357 | 1384 | GGAUGUGAGACUUCAUGGGCC | 2628 | CCCAUGAAGUCUCACAUCCUA | 74.5 | 51.5 |
| 2358 | 1385 | GAUGUGAGACUUCAUGGGCCU | 2629 | GCCCAUGAAGUCUCACAUCCU | 60.9 | 37.9 |
| 2359 | 1386 | AUGUGAGACUUCAUGGGCCUG | 2630 | GGCCCAUGAAGUCUCACAUCC | 42.4 | 19.4 |
| 2360 | 1387 | UGUGAGACUUCAUGGGCCUGG | 2631 | AGGCCCAUGAAGUCUCACAUC | 62.7 | 39.7 |
| 2361 | 1388 | GUGAGACUUCAUGGGCCUGGG | 2632 | CAGGCCCAUGAAGUCUCACAU | 59.6 | 36.6 |
| 2362 | 1389 | UGAGACUUCAUGGGCCUGGGU | 2633 | CCAGGCCCAUGAAGUCUCACA | 42.4 | 19.4 |
| 2363 | 1390 | GAGACUUCAUGGGCCUGGGUU | 2634 | CCCAGGCCCAUGAAGUCUCAC | 51.5 | 28.5 |
| 2364 | 1391 | AGACUUCAUGGGCCUGGGUUC | 2635 | ACCCAGGCCCAUGAAGUCUCA | 61.3 | 38.3 |
| 2365 | 1392 | GACUUCAUGGGCCUGGGUUCU | 2636 | AACCCAGGCCCAUGAAGUCUC | 61.7 | 38.7 |
| 2366 | 1393 | ACUUCAUGGGCCUGGGUUCUG | 2637 | GAACCCAGGCCCAUGAAGUCU | 56.1 | 33.1 |
| 2367 | 1394 | CUUCAUGGGCCUGGGUUCUGU | 2638 | AGAACCCAGGCCCAUGAAGUC | 56.2 | 33.2 |
| 2368 | 1395 | UUCAUGGGCCUGGGUUCUGUU | 2639 | CAGAACCCAGGCCCAUGAAGU | 43.1 | 20.1 |
| 2369 | 1396 | UCAUGGGCCUGGGUUCUGUUG | 2640 | ACAGAACCCAGGCCCAUGAAG | 59 | 36 |
| 2370 | 1397 | CAUGGGCCUGGGUUCUGUUGA | 2641 | AACAGAACCCAGGCCCAUGAA | 73.3 | 50.3 |
| 2371 | 1398 | AUGGGCCUGGGUUCUGUUGAG | 2642 | CAACAGAACCCAGGCCCAUGA | 54.5 | 31.5 |
| 2372 | 1399 | UGGGCCUGGGUUCUGUUGAGU | 2643 | UCAACAGAACCCAGGCCCAUG | 69.3 | 46.3 |
| 2373 | 1400 | GGGCCUGGGUUCUGUUGAGUU | 2644 | CUCAACAGAACCCAGGCCCAU | 72.9 | 49.9 |
| 2374 | 1401 | GGCCUGGGUUCUGUUGAGUUU | 2645 | ACUCAACAGAACCCAGGCCCA | 71.9 | 48.9 |
| 2395 | 1402 | UUUCAGUAUCAAUUUCUUAAA | 2646 | UAAGAAAUUGAUACUGAAAAA | 78.6 | 55.6 |
| 2396 | 1403 | UUCAGUAUCAAUUUCUUAAAC | 2647 | UUAAGAAAUUGAUACUGAAAA | 78.3 | 55.3 |
| 2397 | 1404 | UCAGUAUCAAUUUCUUAAACC | 2648 | UUUAAGAAAUUGAUACUGAAA | 83.6 | 60.6 |
| 2398 | 1405 | CAGUAUCAAUUUCUUAAACCA | 2649 | GUUUAAGAAAUUGAUACUGAA | 72.1 | 49.1 |
| 2399 | 1406 | AGUAUCAAUUUCUUAAACCAA | 2650 | GGUUUAAGAAAUUGAUACUGA | 59.3 | 36.3 |
| 2400 | 1407 | GUAUCAAUUUCUUAAACCAAA | 2651 | UGGUUUAAGAAAUUGAUACUG | 88.9 | 64.9 |
| 2401 | 1408 | UAUCAAUUUCUUAAACCAAAU | 2652 | UUGGUUUAAGAAAUUGAUACU | 79.7 | 55.7 |
| 2402 | 1409 | AUCAAUUUCUUAAACCAAAUU | 2653 | UUUGGUUUAAGAAAUUGAUAC | 77.6 | 53.6 |
| 2403 | 1410 | UCAAUUUCUUAAACCAAAUUU | 2654 | AUUUGGUUUAAGAAAUUGAUA | 78 | 54 |
| 2443 | 1411 | GGGUGCUCAUCUCGUGACCUC | 2655 | GGUCACGAGAUGAGCACCCCC | 57.6 | 33.6 |
| 2444 | 1412 | GGUGCUCAUCUCGUGACCUCU | 2656 | AGGUCACGAGAUGAGCACCCC | 66 | 42 |
| 2445 | 1413 | GUGCUCAUCUCGUGACCUCUG | 2657 | GAGGUCACGAGAUGAGCACCC | 57.1 | 33.1 |
| 2446 | 1414 | UGCUCAUCUCGUGACCUCUGC | 2658 | AGAGGUCACGAGAUGAGCACC | 59.8 | 35.8 |
| 2447 | 1415 | GCUCAUCUCGUGACCUCUGCC | 2659 | CAGAGGUCACGAGAUGAGCAC | 65.9 | 41.9 |
| 2448 | 1416 | CUCAUCUCGUGACCUCUGCCA | 2660 | GCAGAGGUCACGAGAUGAGCA | 54.4 | 30.4 |
| 2449 | 1417 | UCAUCUCGUGACCUCUGCCAC | 2661 | GGCAGAGGUCACGAGAUGAGC | 42 | 18 |
| 2468 | 1418 | ACCCACAUCCUUCACAAACUC | 2662 | GUUUGUGAAGGAUGUGGGUGG | 62.2 | 38.2 |
| 2469 | 1419 | CCCACAUCCUUCACAAACUCC | 2663 | AGUUUGUGAAGGAUGUGGGUG | 79.7 | 55.7 |
| 2470 | 1420 | CCACAUCCUUCACAAACUCCA | 2664 | GAGUUUGUGAAGGAUGUGGGU | 74.1 | 50.1 |
| 2471 | 1421 | CACAUCCUUCACAAACUCCAU | 2665 | GGAGUUUGUGAAGGAUGUGGG | 62 | 38 |
| 2472 | 1422 | ACAUCCUUCACAAACUCCAUG | 2666 | UGGAGUUUGUGAAGGAUGUGG | 80.5 | 56.5 |
| 2473 | 1423 | CAUCCUUCACAAACUCCAUGU | 2667 | AUGGAGUUUGUGAAGGAUGUG | 86.6 | 62.6 |
| 2474 | 1424 | AUCCUUCACAAACUCCAUGUU | 2668 | CAUGGAGUUUGUGAAGGAUGU | 58.6 | 34.6 |
| 2475 | 1425 | UCCUUCACAAACUCCAUGUUU | 2669 | ACAUGGAGUUUGUGAAGGAUG | 66.5 | 42.5 |
| 2476 | 1426 | CCUUCACAAACUCCAUGUUUC | 2670 | AACAUGGAGUUUGUGAAGGAU | 84.7 | 60.7 |
| 2477 | 1427 | CUUCACAAACUCCAUGUUUCA | 2671 | AAACAUGGAGUUUGUGAAGGA | 79.4 | 55.4 |
| 2478 | 1428 | UUCACAAACUCCAUGUUUCAG | 2672 | GAAACAUGGAGUUUGUGAAGG | 62.9 | 38.9 |
| 2479 | 1429 | UCACAAACUCCAUGUUUCAGU | 2673 | UGAAACAUGGAGUUUGUGAAG | 82.2 | 58.2 |
| 2480 | 1430 | CACAAACUCCAUGUUUCAGUG | 2674 | CUGAAACAUGGAGUUUGUGAA | 69.2 | 45.2 |
| 2481 | 1431 | ACAAACUCCAUGUUUCAGUGU | 2675 | ACUGAAACAUGGAGUUUGUGA | 69.6 | 45.6 |
| 2482 | 1432 | CAAACUCCAUGUUUCAGUGUU | 2676 | CACUGAAACAUGGAGUUUGUG | 76.8 | 52.8 |
| 2483 | 1433 | AAACUCCAUGUUUCAGUGUUU | 2677 | ACACUGAAACAUGGAGUUUGU | 70 | 46 |
| 2484 | 1434 | AACUCCAUGUUUCAGUGUUUG | 2678 | AACACUGAAACAUGGAGUUUG | 83.6 | 59.6 |
| 2485 | 1435 | ACUCCAUGUUUCAGUGUUUGA | 2679 | AAACACUGAAACAUGGAGUUU | 89.1 | 65.1 |
| 2486 | 1436 | CUCCAUGUUUCAGUGUUUGAG | 2680 | CAAACACUGAAACAUGGAGUU | 73.6 | 49.6 |
| 2487 | 1437 | UCCAUGUUUCAGUGUUUGAGU | 2681 | UCAAACACUGAAACAUGGAGU | 82.9 | 58.9 |
| 2488 | 1438 | CCAUGUUUCAGUGUUUGAGUC | 2682 | CUCAAACACUGAAACAUGGAG | 75.3 | 51.3 |
| 2489 | 1439 | CAUGUUUCAGUGUUUGAGUCC | 2683 | ACUCAAACACUGAAACAUGGA | 81.8 | 57.8 |
| 2490 | 1440 | AUGUUUCAGUGUUUGAGUCCA | 2684 | GACUCAAACACUGAAACAUGG | 70 | 46 |
| 2491 | 1441 | UGUUUCAGUGUUUGAGUCCAU | 2685 | GGACUCAAACACUGAAACAUG | 62.2 | 38.2 |
| 2492 | 1442 | GUUUCAGUGUUUGAGUCCAUG | 2686 | UGGACUCAAACACUGAAACAU | 86.5 | 62.5 |
| 2493 | 1443 | UUUCAGUGUUUGAGUCCAUGU | 2687 | AUGGACUCAAACACUGAAACA | 72.2 | 48.2 |
| 2494 | 1444 | UUCAGUGUUUGAGUCCAUGUU | 2688 | CAUGGACUCAAACACUGAAAC | 52.2 | 28.2 |
| 2495 | 1445 | UCAGUGUUUGAGUCCAUGUUU | 2689 | ACAUGGACUCAAACACUGAAA | 73.1 | 49.1 |
| 2496 | 1446 | CAGUGUUUGAGUCCAUGUUUA | 2690 | AACAUGGACUCAAACACUGAA | 89.3 | 65.3 |
| 2497 | 1447 | AGUGUUUGAGUCCAUGUUUAU | 2691 | AAACAUGGACUCAAACACUGA | 87.4 | 63.4 |
| 2498 | 1448 | GUGUUUGAGUCCAUGUUUAUU | 2692 | UAAACAUGGACUCAAACACUG | 97.8 | 73.8 |
| 2499 | 1449 | UGUUUGAGUCCAUGUUUAUUC | 2693 | AUAAACAUGGACUCAAACACU | 82.2 | 58.2 |
| 2500 | 1450 | GUUUGAGUCCAUGUUUAUUCU | 2694 | AAUAAACAUGGACUCAAACAC | 75.1 | 50.1 |
| 2501 | 1451 | UUUGAGUCCAUGUUUAUUCUG | 2695 | GAAUAAACAUGGACUCAAACA | 53.2 | 28.2 |
| 2502 | 1452 | UUGAGUCCAUGUUUAUUCUGC | 2696 | AGAAUAAACAUGGACUCAAAC | 61.9 | 36.9 |
| 2503 | 1453 | UGAGUCCAUGUUUAUUCUGCA | 2697 | CAGAAUAAACAUGGACUCAAA | 63.3 | 38.3 |
| 2504 | 1454 | GAGUCCAUGUUUAUUCUGCAA | 2698 | GCAGAAUAAACAUGGACUCAA | 66 | 41 |
| 2505 | 1455 | AGUCCAUGUUUAUUCUGCAAA | 2699 | UGCAGAAUAAACAUGGACUCA | 84.9 | 59.9 |
| 2506 | 1456 | GUCCAUGUUUAUUCUGCAAAU | 2700 | UUGCAGAAUAAACAUGGACUC | 88.8 | 63.8 |
| 2507 | 1457 | UCCAUGUUUAUUCUGCAAAUA | 2701 | UUUGCAGAAUAAACAUGGACU | 75.8 | 50.8 |
| 2508 | 1458 | CCAUGUUUAUUCUGCAAAUAA | 2702 | AUUUGCAGAAUAAACAUGGAC | 85.3 | 60.3 |
| 2509 | 1459 | CAUGUUUAUUCUGCAAAUAAA | 2703 | UAUUUGCAGAAUAAACAUGGA | 93.1 | 68.1 |
| 2510 | 1460 | AUGUUUAUUCUGCAAAUAAAU | 2704 | UUAUUUGCAGAAUAAACAUGG | 89.9 | 64.9 |
| 2511 | 1461 | UGUUUAUUCUGCAAAUAAAUG | 2705 | UUUAUUUGCAGAAUAAACAUG | 97 | 72 |
| 2512 | 1462 | GUUUAUUCUGCAAAUAAAUGG | 2706 | AUUUAUUUGCAGAAUAAACAU | 86.3 | 61.3 |
| 2513 | 1463 | UUUAUUCUGCAAAUAAAUGGU | 2707 | CAUUUAUUUGCAGAAUAAACA | 54.4 | 29.4 |
| 2514 | 1464 | UUAUUCUGCAAAUAAAUGGUA | 2708 | CCAUUUAUUUGCAGAAUAAAC | 45.6 | 20.6 |
| 2515 | 1465 | UAUUCUGCAAAUAAAUGGUAA | 2709 | ACCAUUUAUUUGCAGAAUAAA | 67.8 | 42.8 |
| 2516 | 1466 | AUUCUGCAAAUAAAUGGUAAU | 2710 | UACCAUUUAUUUGCAGAAUAA | 77.9 | 52.9 |
| 2517 | 1467 | UUCUGCAAAUAAAUGGUAAUG | 2711 | UUACCAUUUAUUUGCAGAAUA | 77.6 | 52.6 |
| 2518 | 1468 | UCUGCAAAUAAAUGGUAAUGU | 2712 | AUUACCAUUUAUUUGCAGAAU | 76.4 | 51.4 |
| 2519 | 1469 | CUGCAAAUAAAUGGUAAUGUA | 2713 | CAUUACCAUUUAUUUGCAGAA | 65.2 | 40.2 |
| 2520 | 1470 | UGCAAAUAAAUGGUAAUGUAU | 2714 | ACAUUACCAUUUAUUUGCAGA | 67.1 | 42.1 |
| 2521 | 1471 | GCAAAUAAAUGGUAAUGUAUU | 2715 | UACAUUACCAUUUAUUUGCAG | 100.6 | 75.6 |
| 2522 | 1472 | CAAAUAAAUGGUAAUGUAUUG | 2716 | AUACAUUACCAUUUAUUUGCA | 84.8 | 59.8 |
| 2523 | 1473 | AAAUAAAUGGUAAUGUAUUGG | 2717 | AAUACAUUACCAUUUAUUUGC | 73.1 | 48.1 |
| 2524 | 1474 | AAUAAAUGGUAAUGUAUUGGA | 2718 | CAAUACAUUACCAUUUAUUUG | 75.5 | 50.5 |
| 2525 | 1475 | AUAAAUGGUAAUGUAUUGGA | 2719 | CCAAUACAUUACCAUUUAUUU | 54.7 | 29.7 |
| 2526 | 1476 | UAAAUGGUAAUGUAUUGGA | 2720 | UCCAAUACAUUACCAUUUAUU | 73.6 | 48.6 |

[0110] In Table 4, “Pos.” refers to the position of the siRNA in the GPC2 input sequence. In this case, position 3 of SEQ ID NO: 1 corresponds to position 1 of siRNA positions listed in Table 4. “Score” refers to the predicted efficacy calculated from the SDIR 21 bp model, and “Corr. Score”, or Corrected Score refers to the previous efficacy score minored by the penalties from some intrinsic target features that can influence siRNA efficacy. Each row in Table 4 includes a sense region and complementary antisense region of a duplex of a representative siRNA of the disclosure.

[0111] In some embodiments, the sense region comprises a sequence selected from the group listed in Table 4. In some embodiments, the anti-sense region comprises a sequence selected from the group listed in Table 4. In some embodiments, the sense and anti-sense regions comprise complementary sequences selected from the group listed in Table 4.

[0112] In some embodiments, the siRNA comprises an RNA duplex that is 19 nucleotides in length. In some embodiments, the RNA duplex comprises a sense region and an antisense region that are selected from the group of sequences in Table 5.

TABLE 5
siRNA sense regions and anti-sense regions, 19 bp in length

| | SEQ | | SEQ | | | |
|---|---|---|---|---|---|---|
| | ID | | ID | | | Corr. |
| Pos. | NO: | Sense Region | NO: | Antisense Region | Score | Score |
| 1 | 2721 | GCUCCCAUUGUCUCGGCAG | 4057 | CUGCCGAGACAAUGGGAGC | 66.7 | 66.7 |
| 2 | 2722 | CUCCCAUUGUCUCGGCAGA | 4058 | UCUGCCGAGACAAUGGGAG | 77.3 | 77.3 |
| 3 | 2723 | UCCCAUUGUCUCGGCAGAU | 4059 | AUCUGCCGAGACAAUGGGA | 65 | 65 |
| 4 | 2724 | CCCAUUGUCUCGGCAGAUG | 4060 | CAUCUGCCGAGACAAUGGG | 66.2 | 66.2 |
| 5 | 2725 | CCAUUGUCUCGGCAGAUGC | 4061 | GCAUCUGCCGAGACAAUGG | 65.2 | 65.2 |
| 6 | 2726 | CAUUGUCUCGGCAGAUGCC | 4062 | GGCAUCUGCCGAGACAAUG | 61.9 | 61.9 |
| 7 | 2727 | AUUGUCUCGGCAGAUGCCG | 4063 | CGGCAUCUGCCGAGACAAU | 46.6 | 46.6 |
| 8 | 2728 | UUGUCUCGGCAGAUGCCGC | 4064 | GCGGCAUCUGCCGAGACAA | 43.7 | 43.7 |
| 9 | 2729 | UGUCUCGGCAGAUGCCGCC | 4065 | GGCGGCAUCUGCCGAGACA | 42.8 | 42.8 |
| 10 | 2730 | GUCUCGGCAGAUGCCGCCU | 4066 | AGGCGGCAUCUGCCGAGAC | 61.5 | 61.5 |
| 11 | 2731 | UCUCGGCAGAUGCCGCCUG | 4067 | CAGGCGGCAUCUGCCGAGA | 49.7 | 49.7 |
| 12 | 2732 | CUCGGCAGAUGCCGCCUGG | 4068 | CCAGGCGGCAUCUGCCGAG | 52.4 | 52.4 |
| 13 | 2733 | UCGGCAGAUGCCGCCUGGU | 4069 | ACCAGGCGGCAUCUGCCGA | 51 | 51 |
| 14 | 2734 | CGGCAGAUGCCGCCUGGUC | 4070 | GACCAGGCGGCAUCUGCCG | 60.6 | 60.6 |
| 15 | 2735 | GGCAGAUGCCGCCUGGUCC | 4071 | GGACCAGGCGGCAUCUGCC | 60 | 60 |
| 16 | 2736 | GCAGAUGCCGCCUGGUCCA | 4072 | UGGACCAGGCGGCAUCUGC | 79.3 | 79.3 |
| 17 | 2737 | CAGAUGCCGCCUGGUCCAG | 4073 | CUGGACCAGGCGGCAUCUG | 58.4 | 58.4 |
| 18 | 2738 | AGAUGCCGCCUGGUCCAGC | 4074 | GCUGGACCAGGCGGCAUCU | 45 | 45 |
| 19 | 2739 | GAUGCCGCCUGGUCCAGCU | 4075 | AGCUGGACCAGGCGGCAUC | 66.8 | 66.8 |
| 20 | 2740 | AUGCCGCCUGGUCCAGCUA | 4076 | UAGCUGGACCAGGCGGCAU | 70.7 | 70.7 |
| 21 | 2741 | UGCCGCCUGGUCCAGCUAU | 4077 | AUAGCUGGACCAGGCGGCA | 64.7 | 64.7 |
| 22 | 2742 | GCCGCCUGGUCCAGCUAUC | 4078 | GAUAGCUGGACCAGGCGGC | 63.7 | 63.7 |
| 23 | 2743 | CCGCCUGGUCCAGCUAUCG | 4079 | CGAUAGCUGGACCAGGCGG | 57.4 | 57.4 |
| 24 | 2744 | CGCCUGGUCCAGCUAUCGU | 4080 | ACGAUAGCUGGACCAGGCG | 69.8 | 69.8 |
| 25 | 2745 | GCCUGGUCCAGCUAUCGUG | 4081 | CACGAUAGCUGGACCAGGC | 68.9 | 68.9 |
| 26 | 2746 | CCUGGUCCAGCUAUCGUGC | 4082 | GCACGAUAGCUGGACCAGG | 60.3 | 60.3 |
| 27 | 2747 | CUGGUCCAGCUAUCGUGCU | 4083 | AGCACGAUAGCUGGACCAG | 65.2 | 65.2 |
| 28 | 2748 | UGGUCCAGCUAUCGUGCUC | 4084 | GAGCACGAUAGCUGGACCA | 59.9 | 59.9 |
| 29 | 2749 | GGUCCAGCUAUCGUGCUCG | 4085 | CGAGCACGAUAGCUGGACC | 63.3 | 63.3 |
| 30 | 2750 | GUCCAGCUAUCGUGCUCGG | 4086 | CCGAGCACGAUAGCUGGAC | 64.1 | 64.1 |
| 31 | 2751 | UCCAGCUAUCGUGCUCGGU | 4087 | ACCGAGCACGAUAGCUGGA | 55.9 | 55.9 |
| 32 | 2752 | CCAGCUAUCGUGCUCGGUA | 4088 | UACCGAGCACGAUAGCUGG | 82.1 | 82.1 |
| 33 | 2753 | CAGCUAUCGUGCUCGGUAU | 4089 | AUACCGAGCACGAUAGCUG | 84.6 | 84.6 |
| 34 | 2754 | AGCUAUCGUGCUCGGUAUU | 4090 | AAUACCGAGCACGAUAGCU | 77.8 | 77.8 |
| 35 | 2755 | GCUAUCGUGCUCGGUAUUC | 4091 | GAAUACCGAGCACGAUAGC | 63 | 63 |
| 36 | 2756 | CUAUCGUGCUCGGUAUUCA | 4092 | UGAAUACCGAGCACGAUAG | 78.5 | 78.5 |
| 37 | 2757 | UAUCGUGCUCGGUAUUCAG | 4093 | CUGAAUACCGAGCACGAUA | 63 | 63 |
| 38 | 2758 | AUCGUGCUCGGUAUUCAGU | 4094 | ACUGAAUACCGAGCACGAU | 61.9 | 61.9 |
| 39 | 2759 | UCGUGCUCGGUAUUCAGUU | 4095 | AACUGAAUACCGAGCACGA | 66.8 | 66.8 |
| 40 | 2760 | CGUGCUCGGUAUUCAGUUU | 4096 | AAACUGAAUACCGAGCACG | 87.3 | 87.3 |
| 57 | 2761 | UUUCCGGAGCAGCGCUCUU | 4097 | AAGAGCGCUGCUCCGGAAA | 63.6 | 63.6 |
| 58 | 2762 | UUCCGGAGCAGCGCUCUUU | 4098 | AAAGAGCGCUGCUCCGGAA | 60.2 | 60.2 |
| 59 | 2763 | UCCGGAGCAGCGCUCUUUC | 4099 | GAAAGAGCGCUGCUCCGGA | 55.6 | 55.6 |
| 60 | 2764 | CCGGAGCAGCGCUCUUUCU | 4100 | AGAAAGAGCGCUGCUCCGG | 74.7 | 74.7 |
| 61 | 2765 | CGGAGCAGCGCUCUUUCUC | 4101 | GAGAAAGAGCGCUGCUCCG | 64.3 | 64.3 |
| 62 | 2766 | GGAGCAGCGCUCUUUCUCU | 4102 | AGAGAAAGAGCGCUGCUCC | 78.6 | 78.6 |
| 63 | 2767 | GAGCAGCGCUCUUUCUCUG | 4103 | CAGAGAAAGAGCGCUGCUC | 71.7 | 71.7 |
| 64 | 2768 | AGCAGCGCUCUUUCUCUGG | 4104 | CCAGAGAAAGAGCGCUGCU | 58.5 | 58.5 |
| 81 | 2769 | GGCCCGCGGAGCGGUCCCG | 4105 | CGGGACCGCUCCGCGGGCC | 51.7 | 51.7 |
| 82 | 2770 | GCCCGCGGAGCGGUCCCGC | 4106 | GCGGGACCGCUCCGCGGGC | 43.5 | 43.5 |
| 83 | 2771 | CCCGCGGAGCGGUCCCGCG | 4107 | CGCGGGACCGCUCCGCGGG | 53.5 | 53.5 |
| 84 | 2772 | CCGCGGAGCGGUCCCGCGG | 4108 | CCGCGGGACCGCUCCGCGG | 55.6 | 55.6 |
| 85 | 2773 | CGCGGAGCGGUCCCGCGGC | 4109 | GCCGCGGGACCGCUCCGCG | 52.1 | 52.1 |
| 86 | 2774 | GCGGAGCGGUCCCGCGGCC | 4110 | GGCCGCGGGACCGCUCCGC | 53.1 | 53.1 |
| 87 | 2775 | CGGAGCGGUCCCGCGGCCG | 4111 | CGGCCGCGGGACCGCUCCG | 49.3 | 49.3 |
| 88 | 2776 | GGAGCGGUCCCGCGGCCGA | 4112 | UCGGCCGCGGGACCGCUCC | 77.5 | 77.5 |
| 89 | 2777 | GAGCGGUCCCGCGGCCGAG | 4113 | CUCGGCCGCGGGACCGCUC | 60.3 | 60.3 |
| 90 | 2778 | AGCGGUCCCGCGGCCGAGU | 4114 | ACUCGGCCGCGGGACCGCU | 59.7 | 59.7 |
| 91 | 2779 | GCGGUCCCGCGGCCGAGUA | 4115 | UACUCGGCCGCGGGACCGC | 77 | 77 |
| 92 | 2780 | CGGUCCCGCGGCCGAGUAC | 4116 | GUACUCGGCCGCGGGACCG | 62.2 | 62.2 |
| 93 | 2781 | GGUCCCGCGGCCGAGUACC | 4117 | GGUACUCGGCCGCGGGACC | 53.9 | 53.9 |
| 94 | 2782 | GUCCCGCGGCCGAGUACCG | 4118 | CGGUACUCGGCCGCGGGAC | 55.3 | 55.3 |
| 95 | 2783 | UCCCGCGGCCGAGUACCGG | 4119 | CCGGUACUCGGCCGCGGGA | 39.4 | 39.4 |
| 96 | 2784 | CCCGCGGCCGAGUACCGGA | 4120 | UCCGGUACUCGGCCGCGGG | 71.2 | 71.2 |
| 97 | 2785 | CCGCGGCCGAGUACCGGAU | 4121 | AUCCGGUACUCGGCCGCGG | 72.5 | 72.5 |
| 98 | 2786 | CGCGGCCGAGUACCGGAUU | 4122 | AAUCCGGUACUCGGCCGCG | 73.3 | 73.3 |
| 99 | 2787 | GCGGCCGAGUACCGGAUUC | 4123 | GAAUCCGGUACUCGGCCGC | 66.5 | 66.5 |
| 100 | 2788 | CGGCCGAGUACCGGAUUCC | 4124 | GGAAUCCGGUACUCGGCCG | 58.4 | 57.4 |
| 101 | 2789 | GGCCGAGUACCGGAUUCCC | 4125 | GGGAAUCCGGUACUCGGCC | 61.5 | 60.5 |
| 102 | 2790 | GCCGAGUACCGGAUUCCCG | 4126 | CGGGAAUCCGGUACUCGGC | 64.4 | 63.4 |
| 103 | 2791 | CCGAGUACCGGAUUCCCGA | 4127 | UCGGGAAUCCGGUACUCGG | 82.3 | 81.3 |
| 104 | 2792 | CGAGUACCGGAUUCCCGAG | 4128 | CUCGGGAAUCCGGUACUCG | 72.3 | 71.3 |
| 105 | 2793 | GAGUACCGGAUUCCCGAGU | 4129 | ACUCGGGAAUCCGGUACUC | 69.7 | 68.7 |
| 106 | 2794 | AGUACCGGAUUCCCGAGUU | 4130 | AACUCGGGAAUCCGGUACU | 76.4 | 75.4 |
| 107 | 2795 | GUACCGGAUUCCCGAGUUU | 4131 | AAACUCGGGAAUCCGGUAC | 82.4 | 81.4 |
| 108 | 2796 | UACCGGAUUCCCGAGUUUG | 4132 | CAAACUCGGGAAUCCGGUA | 60.4 | 59.4 |
| 109 | 2797 | ACCGGAUUCCCGAGUUUGG | 4133 | CCAAACUCGGGAAUCCGGU | 63.2 | 62.2 |
| 110 | 2798 | CCGGAUUCCCGAGUUUGGG | 4134 | CCCAAACUCGGGAAUCCGG | 57.2 | 56.2 |
| 111 | 2799 | CGGAUUCCCGAGUUUGGGA | 4135 | UCCCAAACUCGGGAAUCCG | 77.8 | 76.8 |
| 112 | 2800 | GGAUUCCCGAGUUUGGGAG | 4136 | CUCCCAAACUCGGGAAUCC | 66.1 | 65.1 |
| 113 | 2801 | GAUUCCCGAGUUUGGGAGG | 4137 | CCUCCCAAACUCGGGAAUC | 59.9 | 58.9 |
| 114 | 2802 | AUUCCCGAGUUUGGGAGGC | 4138 | GCCUCCCAAACUCGGGAAU | 39.9 | 38.9 |
| 115 | 2803 | UUCCCGAGUUUGGGAGGCU | 4139 | AGCCUCCCAAACUCGGGAA | 52.9 | 51.9 |
| 116 | 2804 | UCCCGAGUUUGGGAGGCUC | 4140 | GAGCCUCCCAAACUCGGGA | 53.8 | 52.8 |
| 117 | 2805 | CCCGAGUUUGGGAGGCUCU | 4141 | AGAGCCUCCCAAACUCGGG | 73 | 72 |
| 118 | 2806 | CCGAGUUUGGGAGGCUCUG | 4142 | CAGAGCCUCCCAAACUCGG | 65.8 | 64.8 |
| 119 | 2807 | CGAGUUUGGGAGGCUCUGC | 4143 | GCAGAGCCUCCCAAACUCG | 60 | 59 |
| 120 | 2808 | GAGUUUGGGAGGCUCUGCU | 4144 | AGCAGAGCCUCCCAAACUC | 69.7 | 68.7 |
| 121 | 2809 | AGUUUGGGAGGCUCUGCUU | 4145 | AAGCAGAGCCUCCCAAACU | 76.8 | 75.8 |
| 122 | 2810 | GUUUGGGAGGCUCUGCUUU | 4146 | AAAGCAGAGCCUCCCAAAC | 74.8 | 73.8 |
| 123 | 2811 | UUUGGGAGGCUCUGCUUUC | 4147 | GAAAGCAGAGCCUCCCAAA | 50.8 | 49.8 |
| 124 | 2812 | UUGGGAGGCUCUGCUUUCC | 4148 | GGAAAGCAGAGCCUCCCAA | 44.3 | 43.3 |
| 125 | 2813 | UGGGAGGCUCUGCUUUCCU | 4149 | AGGAAAGCAGAGCCUCCCA | 61.3 | 60.3 |
| 126 | 2814 | GGGAGGCUCUGCUUUCCUC | 4150 | GAGGAAAGCAGAGCCUCCC | 68.6 | 67.6 |
| 127 | 2815 | GGAGGCUCUGCUUUCCUCC | 4151 | GGAGGAAAGCAGAGCCUCC | 61.6 | 60.6 |
| 128 | 2816 | GAGGCUCUGCUUUCCUCCU | 4152 | AGGAGGAAAGCAGAGCCUC | 73.5 | 72.5 |
| 129 | 2817 | AGGCUCUGCUUUCCUCCUU | 4153 | AAGGAGGAAAGCAGAGCCU | 74 | 73 |
| 130 | 2818 | GGCUCUGCUUUCCUCCUUA | 4154 | UAAGGAGGAAAGCAGAGCC | 92.8 | 91.8 |
| 131 | 2819 | GCUCUGCUUUCCUCCUUAG | 4155 | CUAAGGAGGAAAGCAGAGC | 78.7 | 77.7 |
| 132 | 2820 | CUCUGCUUUCCUCCUUAGG | 4156 | CCUAAGGAGGAAAGCAGAG | 59.6 | 58.6 |
| 133 | 2821 | UCUGCUUUCCUCCUUAGGA | 4157 | UCCUAAGGAGGAAAGCAGA | 69.4 | 68.4 |
| 134 | 2822 | CUGCUUUCCUCCUUAGGAC | 4158 | GUCCUAAGGAGGAAAGCAG | 64.4 | 63.4 |
| 135 | 2823 | UGCUUUCCUCCUUAGGACC | 4159 | GGUCCUAAGGAGGAAAGCA | 55.9 | 54.9 |
| 136 | 2824 | GCUUUCCUCCUUAGGACCC | 4160 | GGGUCCUAAGGAGGAAAGC | 60 | 59 |
| 137 | 2825 | CUUUCCUCCUUAGGACCCA | 4161 | UGGGUCCUAAGGAGGAAAG | 72.1 | 71.1 |
| 138 | 2826 | UUUCCUCCUUAGGACCCAC | 4162 | GUGGGUCCUAAGGAGGAAA | 50.3 | 49.3 |
| 139 | 2827 | UUCCUCCUUAGGACCCACU | 4163 | AGUGGGUCCUAAGGAGGAA | 54 | 53 |
| 140 | 2828 | UCCUCCUUAGGACCCACUU | 4164 | AAGUGGGUCCUAAGGAGGA | 67.1 | 66.1 |
| 141 | 2829 | CCUCCUUAGGACCCACUUU | 4165 | AAAGUGGGUCCUAAGGAGG | 79.3 | 78.3 |
| 142 | 2830 | CUCCUUAGGACCCACUUUG | 4166 | CAAAGUGGGUCCUAAGGAG | 64.6 | 63.6 |
| 143 | 2831 | UCCUUAGGACCCACUUUGC | 4167 | GCAAAGUGGGUCCUAAGGA | 54.2 | 53.2 |
| 144 | 2832 | CCUUAGGACCCACUUUGCC | 4168 | GGCAAAGUGGGUCCUAAGG | 56.6 | 55.6 |
| 145 | 2833 | CUUAGGACCCACUUUGCCG | 4169 | CGGCAAAGUGGGUCCUAAG | 56.1 | 55.1 |
| 146 | 2834 | UUAGGACCCACUUUGCCGU | 4170 | ACGGCAAAGUGGGUCCUAA | 51.4 | 50.4 |
| 147 | 2835 | UAGGACCCACUUUGCCGUC | 4171 | GACGGCAAAGUGGGUCCUA | 45.6 | 44.6 |
| 148 | 2836 | AGGACCCACUUUGCCGUCC | 4172 | GGACGGCAAAGUGGGUCCU | 46.8 | 45.8 |
| 149 | 2837 | GGACCCACUUUGCCGUCCU | 4173 | AGGACGGCAAAGUGGGUCC | 71.8 | 70.8 |
| 150 | 2838 | GACCCACUUUGCCGUCCUG | 4174 | CAGGACGGCAAAGUGGGUC | 66.3 | 65.3 |
| 151 | 2839 | ACCCACUUUGCCGUCCUGG | 4175 | CCAGGACGGCAAAGUGGGU | 43.4 | 42.4 |
| 152 | 2840 | CCCACUUUGCCGUCCUGGG | 4176 | CCCAGGACGGCAAAGUGGG | 52.2 | 51.2 |
| 173 | 2841 | GGCUGCAGUUAUGUCCGCG | 4177 | CGCGGACAUAACUGCAGCC | 64.5 | 63.5 |
| 174 | 2842 | GCUGCAGUUAUGUCCGCGC | 4178 | GCGCGGACAUAACUGCAGC | 63.3 | 62.3 |
| 175 | 2843 | CUGCAGUUAUGUCCGCGCU | 4179 | AGCGCGGACAUAACUGCAG | 73.6 | 72.6 |
| 176 | 2844 | UGCAGUUAUGUCCGCGCUG | 4180 | CAGCGCGGACAUAACUGCA | 63.9 | 62.9 |
| 177 | 2845 | GCAGUUAUGUCCGCGCUGC | 4181 | GCAGCGCGGACAUAACUGC | 64.7 | 63.7 |
| 178 | 2846 | CAGUUAUGUCCGCGCUGCG | 4182 | CGCAGCGCGGACAUAACUG | 65.1 | 64.1 |
| 179 | 2847 | AGUUAUGUCCGCGCUGCGA | 4183 | UCGCAGCGCGGACAUAACU | 80.4 | 79.4 |
| 180 | 2848 | GUUAUGUCCGCGCUGCGAC | 4184 | GUCGCAGCGCGGACAUAAC | 64.7 | 63.7 |
| 181 | 2849 | UUAUGUCCGCGCUGCGACC | 4185 | GGUCGCAGCGCGGACAUAA | 50 | 49 |
| 182 | 2850 | UAUGUCCGCGCUGCGACCU | 4186 | AGGUCGCAGCGCGGACAUA | 55.1 | 54.1 |
| 183 | 2851 | AUGUCCGCGCUGCGACCUC | 4187 | GAGGUCGCAGCGCGGACAU | 53.9 | 52.9 |
| 184 | 2852 | UGUCCGCGCUGCGACCUCU | 4188 | AGAGGUCGCAGCGCGGACA | 67.7 | 66.7 |
| 185 | 2853 | GUCCGCGCUGCGACCUCUC | 4189 | GAGAGGUCGCAGCGCGGAC | 62.1 | 61.1 |
| 186 | 2854 | UCCGCGCUGCGACCUCUCC | 4190 | GGAGAGGUCGCAGCGCGGA | 50.6 | 49.6 |
| 187 | 2855 | CCGCGCUGCGACCUCUCCU | 4191 | AGGAGAGGUCGCAGCGCGG | 68.7 | 67.7 |
| 188 | 2856 | CGCGCUGCGACCUCUCCUG | 4192 | CAGGAGAGGUCGCAGCGCG | 68.7 | 67.7 |
| 189 | 2857 | GCGCUGCGACCUCUCCUGC | 4193 | GCAGGAGAGGUCGCAGCGC | 62.6 | 61.6 |
| 190 | 2858 | CGCUGCGACCUCUCCUGCU | 4194 | AGCAGGAGAGGUCGCAGCG | 74.8 | 73.8 |
| 191 | 2859 | GCUGCGACCUCUCCUGCUU | 4195 | AAGCAGGAGAGGUCGCAGC | 86.7 | 85.7 |
| 192 | 2860 | CUGCGACCUCUCCUGCUUC | 4196 | GAAGCAGGAGAGGUCGCAG | 65.2 | 64.2 |
| 193 | 2861 | UGCGACCUCUCCUGCUUCU | 4197 | AGAAGCAGGAGAGGUCGCA | 71 | 70 |
| 194 | 2862 | GCGACCUCUCCUGCUUCUG | 4198 | CAGAAGCAGGAGAGGUCGC | 68.9 | 67.9 |
| 195 | 2863 | CGACCUCUCCUGCUUCUGC | 4199 | GCAGAAGCAGGAGAGGUCG | 65.4 | 64.4 |
| 196 | 2864 | GACCUCUCCUGCUUCUGCU | 4200 | AGCAGAAGCAGGAGAGGUC | 74.3 | 73.3 |
| 197 | 2865 | ACCUCUCCUGCUUCUGCUG | 4201 | CAGCAGAAGCAGGAGAGGU | 64.2 | 63.2 |
| 198 | 2866 | CCUCUCCUGCUUCUGCUGC | 4202 | GCAGCAGAAGCAGGAGAGG | 56 | 55 |
| 199 | 2867 | CUCUCCUGCUUCUGCUGCU | 4203 | AGCAGCAGAAGCAGGAGAG | 70.4 | 69.4 |
| 200 | 2868 | UCUCCUGCUUCUGCUGCUG | 4204 | CAGCAGCAGAAGCAGGAGA | 59.6 | 57.6 |
| 201 | 2869 | CUCCUGCUUCUGCUGCUGC | 4205 | GCAGCAGCAGAAGCAGGAG | 55.8 | 53.8 |
| 202 | 2870 | UCCUGCUUCUGCUGCUGCC | 4206 | GGCAGCAGCAGAAGCAGGA | 51.3 | 49.3 |
| 203 | 2871 | CCUGCUUCUGCUGCUGCCU | 4207 | AGGCAGCAGCAGAAGCAGG | 68.8 | 66.8 |
| 204 | 2872 | CUGCUUCUGCUGCUGCCUC | 4208 | GAGGCAGCAGCAGAAGCAG | 58.8 | 56.8 |
| 205 | 2873 | UGCUUCUGCUGCUGCCUCU | 4209 | AGAGGCAGCAGCAGAAGCA | 68.6 | 66.6 |
| 206 | 2874 | GCUUCUGCUGCUGCCUCUG | 4210 | CAGAGGCAGCAGCAGAAGC | 68.9 | 66.9 |
| 207 | 2875 | CUUCUGCUGCUGCCUCUGU | 4211 | ACAGAGGCAGCAGCAGAAG | 68.9 | 66.9 |
| 208 | 2876 | UUCUGCUGCUGCCUCUGUG | 4212 | CACAGAGGCAGCAGCAGAA | 53.8 | 51.8 |
| 209 | 2877 | UCUGCUGCUGCCUCUGUGU | 4213 | ACACAGAGGCAGCAGCAGA | 65.6 | 63.6 |
| 210 | 2878 | CUGCUGCUGCCUCUGUGUC | 4214 | GACACAGAGGCAGCAGCAG | 59.7 | 57.7 |
| 211 | 2879 | UGCUGCUGCCUCUGUGUCC | 4215 | GGACACAGAGGCAGCAGCA | 54.8 | 52.8 |
| 212 | 2880 | GCUGCUGCCUCUGUGUCCC | 4216 | GGGACACAGAGGCAGCAGC | 60.7 | 58.7 |
| 213 | 2881 | CUGCUGCCUCUGUGUCCCG | 4217 | CGGGACACAGAGGCAGCAG | 57.1 | 55.1 |
| 214 | 2882 | UGCUGCCUCUGUGUCCCGG | 4218 | CCGGGACACAGAGGCAGCA | 49.3 | 47.3 |
| 215 | 2883 | GCUGCCUCUGUGUCCCGGU | 4219 | ACCGGGACACAGAGGCAGC | 65.6 | 66.6 |
| 216 | 2884 | CUGCCUCUGUGUCCCGGUC | 4220 | GACCGGGACACAGAGGCAG | 60 | 58 |
| 217 | 2885 | UGCCUCUGUGUCCCGGUCC | 4221 | GGACCGGGACACAGAGGCA | 48.2 | 46.2 |
| 218 | 2886 | GCCUCUGUGUCCCGGUCCU | 4222 | AGGACCGGGACACAGAGGC | 76.7 | 74.7 |
| 219 | 2887 | CCUCUGUGUCCCGGUCCUG | 4223 | CAGGACCGGGACACAGAGG | 64.8 | 62.8 |
| 220 | 2888 | CUCUGUGUCCCGGUCCUGG | 4224 | CCAGGACCGGGACACAGAG | 55.8 | 53.8 |
| 221 | 2889 | UCUGUGUCCCGGUCCUGGU | 4225 | ACCAGGACCGGGACACAGA | 63.4 | 61.4 |
| 222 | 2890 | CUGUGUCCCGGUCCUGGUC | 4226 | GACCAGGACCGGGACACAG | 61 | 59 |
| 223 | 2891 | UGUGUCCCGGUCCUGGUCC | 4227 | GGACCAGGACCGGGACACA | 47.5 | 45.5 |
| 224 | 2892 | GUGUCCCGGUCCUGGUCCC | 4228 | GGGACCAGGACCGGGACAC | 56 | 54 |
| 225 | 2893 | UGUCCCGGUCCUGGUCCCG | 4229 | CGGGACCAGGACCGGGACA | 46 | 44 |
| 226 | 2894 | GUCCCGGUCCUGGUCCCGG | 4230 | CCGGGACCAGGACCGGGAC | 49.5 | 47.5 |
| 227 | 2895 | UCCCGGUCCUGGUCCCGGA | 4231 | UCCGGGACCAGGACCGGGA | 67.1 | 65.1 |
| 228 | 2896 | CCCGGUCCUGGUCCCGGAC | 4232 | GUCCGGGACCAGGACCGGG | 59.4 | 57.4 |
| 229 | 2897 | CCGGUCCUGGUCCCGGACC | 4233 | GGUCCGGGACCAGGACCGG | 50.3 | 48.3 |
| 230 | 2898 | CGGUCCUGGUCCCGGACCC | 4234 | GGGUCCGGGACCAGGACCG | 58 | 56 |
| 231 | 2899 | GGUCCUGGUCCCGGACCCG | 4235 | CGGGUCCGGGACCAGGACC | 60.4 | 58.4 |
| 232 | 2900 | GUCCUGGUCCCGGACCCGG | 4236 | CCGGGUCCGGGACCAGGAC | 51.5 | 49.5 |
| 233 | 2901 | UCCUGGUCCCGGACCCGGG | 4237 | CCCGGGUCCGGGACCAGGA | 45.8 | 43.8 |
| 234 | 2902 | CCUGGUCCCGGACCCGGGA | 4238 | UCCCGGGUCCGGGACCAGG | 69.8 | 67.8 |
| 235 | 2903 | CUGGUCCCGGACCCGGGAG | 4239 | CUCCCGGGUCCGGGACCAG | 49.4 | 47.4 |
| 236 | 2904 | UGGUCCCGGACCCGGGAGC | 4240 | GCUCCCGGGUCCGGGACCA | 39.2 | 37.2 |
| 237 | 2905 | GGUCCCGGACCCGGGAGCG | 4241 | CGCUCCCGGGUCCGGGACC | 52 | 50 |
| 238 | 2906 | GUCCCGGACCCGGGAGCGA | 4242 | UCGCUCCCGGGUCCGGGAC | 68.7 | 66.7 |
| 239 | 2907 | UCCCGGACCCGGGAGCGAG | 4243 | CUCGCUCCCGGGUCCGGGA | 49.9 | 47.9 |
| 240 | 2908 | CCCGGACCCGGGAGCGAGG | 4244 | CCUCGCUCCCGGGUCCGGG | 56.2 | 54.2 |
| 241 | 2909 | CCGGACCCGGGAGCGAGGC | 4245 | GCCUCGCUCCCGGGUCCGG | 43.7 | 41.7 |
| 242 | 2910 | CGGACCCGGGAGCGAGGCA | 4246 | UGCCUCGCUCCCGGGUCCG | 70.6 | 68.6 |
| 243 | 2911 | GGACCCGGGAGCGAGGCAA | 4247 | UUGCCUCGCUCCCGGGUCC | 80.4 | 78.4 |
| 244 | 2912 | GACCCGGGAGCGAGGCAAA | 4248 | UUUGCCUCGCUCCCGGGUC | 85.2 | 83.2 |
| 245 | 2913 | ACCCGGGAGCGAGGCAAAG | 4249 | CUUUGCCUCGCUCCCGGGU | 58.6 | 56.6 |
| 246 | 2914 | CCCGGGAGCGAGGCAAAGG | 4250 | CCUUUGCCUCGCUCCCGGG | 55.6 | 53.6 |
| 247 | 2915 | CCGGGAGCGAGGCAAAGGU | 4251 | ACCUUUGCCUCGCUCCCGG | 68.9 | 66.9 |
| 248 | 2916 | CGGGAGCGAGGCAAAGGUC | 4252 | GACCUUUGCCUCGCUCCCG | 67.7 | 65.7 |
| 249 | 2917 | GGGAGCGAGGCAAAGGUCA | 4253 | UGACCUUUGCCUCGCUCCC | 84.3 | 82.3 |
| 250 | 2918 | GGAGCGAGGCAAAGGUCAC | 4254 | GUGACCUUUGCCUCGCUCC | 76.6 | 74.6 |
| 251 | 2919 | GAGCGAGGCAAAGGUCACC | 4255 | GGUGACCUUUGCCUCGCUC | 60.4 | 58.4 |
| 252 | 2920 | AGCGAGGCAAAGGUCACCC | 4256 | GGGUGACCUUUGCCUCGCU | 52.5 | 50.5 |
| 253 | 2921 | GCGAGGCAAAGGUCACCCG | 4257 | CGGGUGACCUUUGCCUCGC | 66.5 | 64.5 |
| 254 | 2922 | CGAGGCAAAGGUCACCCGG | 4258 | CCGGGUGACCUUUGCCUCG | 64.1 | 62.1 |
| 255 | 2923 | GAGGCAAAGGUCACCCGGA | 4259 | UCCGGGUGACCUUUGCCUC | 78.1 | 76.1 |
| 256 | 2924 | AGGCAAAGGUCACCCGGAG | 4260 | CUCCGGGUGACCUUUGCCU | 65.4 | 63.4 |
| 257 | 2925 | GGCAAAGGUCACCCGGAGU | 4261 | ACUCCGGGUGACCUUUGCC | 75.8 | 73.8 |
| 258 | 2926 | GCAAAGGUCACCCGGAGUU | 4262 | AACUCCGGGUGACCUUUGC | 79.5 | 77.5 |
| 259 | 2927 | CAAAGGUCACCCGGAGUUG | 4263 | CAACUCCGGGUGACCUUUG | 69.5 | 67.5 |
| 260 | 2928 | AAAGGUCACCCGGAGUUGU | 4264 | ACAACUCCGGGUGACCUUU | 68.3 | 66.3 |
| 261 | 2929 | AAGGUCACCCGGAGUUGUG | 4265 | CACAACUCCGGGUGACCUU | 62.2 | 60.2 |
| 262 | 2930 | AGGUCACCCGGAGUUGUGC | 4266 | GCACAACUCCGGGUGACCU | 56.9 | 54.9 |
| 263 | 2931 | GGUCACCCGGAGUUGUGCA | 4267 | UGCACAACUCCGGGUGACC | 82.6 | 80.6 |
| 264 | 2932 | GUCACCCGGAGUUGUGCAG | 4268 | CUGCACAACUCCGGGUGAC | 65.2 | 63.2 |
| 265 | 2933 | UCACCCGGAGUUGUGCAGA | 4269 | UCUGCACAACUCCGGGUGA | 66.2 | 64.2 |
| 266 | 2934 | CACCCGGAGUUGUGCAGAG | 4270 | CUCUGCACAACUCCGGGUG | 72.2 | 70.2 |
| 267 | 2935 | ACCCGGAGUUGUGCAGAGA | 4271 | UCUCUGCACAACUCCGGGU | 80.3 | 78.3 |
| 268 | 2936 | CCCGGAGUUGUGCAGAGAC | 4272 | GUCUCUGCACAACUCCGGG | 71 | 69 |
| 269 | 2937 | CCGGAGUUGUGCAGAGACC | 4273 | GGUCUCUGCACAACUCCGG | 71.6 | 69.6 |
| 270 | 2938 | CGGAGUUGUGCAGAGACCC | 4274 | GGGUCUCUGCACAACUCCG | 67.4 | 65.4 |
| 271 | 2939 | GGAGUUGUGCAGAGACCCG | 4275 | CGGGUCUCUGCACAACUCC | 75.5 | 73.5 |
| 272 | 2940 | GAGUUGUGCAGAGACCCGG | 4276 | CCGGGUCUCUGCACAACUC | 66.7 | 64.7 |
| 273 | 2941 | AGUUGUGCAGAGACCCGGC | 4277 | GCCGGGUCUCUGCACAACU | 63 | 61 |
| 274 | 2942 | GUUGUGCAGAGACCCGGCA | 4278 | UGCCGGGUCUCUGCACAAC | 78.6 | 76.6 |
| 275 | 2943 | UUGUGCAGAGACCCGGCAG | 4279 | CUGCCGGGUCUCUGCACAA | 55.4 | 53.4 |
| 276 | 2944 | UGUGCAGAGACCCGGCAGG | 4280 | CCUGCCGGGUCUCUGCACA | 55 | 53 |
| 277 | 2945 | GUGCAGAGACCCGGCAGGU | 4281 | ACCUGCCGGGUCUCUGCAC | 66.3 | 64.3 |
| 278 | 2946 | UGCAGAGACCCGGCAGGUG | 4282 | CACCUGCCGGGUCUCUGCA | 56.7 | 54.7 |
| 279 | 2947 | GCAGAGACCCGGCAGGUGC | 4283 | GCACCUGCCGGGUCUCUGC | 64.8 | 62.8 |
| 280 | 2948 | CAGAGACCCGGCAGGUGCU | 4284 | AGCACCUGCCGGGUCUCUG | 72.8 | 70.8 |
| 281 | 2949 | AGAGACCCGGCAGGUGCUG | 4285 | CAGCACCUGCCGGGUCUCU | 57.8 | 55.8 |
| 282 | 2950 | GAGACCCGGCAGGUGCUGG | 4286 | CCAGCACCUGCCGGGUCUC | 53.6 | 51.6 |
| 283 | 2951 | AGACCCGGCAGGUGCUGGG | 4287 | CCCAGCACCUGCCGGGUCU | 50.9 | 48.9 |
| 308 | 2952 | GGGAUAUAGCUUAAACCUA | 4288 | UAGGUUUAAGCUAUAUCCC | 94.8 | 91.8 |
| 309 | 2953 | GGAUAUAGCUUAAACCUAA | 4289 | UUAGGUUUAAGCUAUAUCC | 103 | 100.3 |
| 310 | 2954 | GAUAUAGCUUAAACCUAAU | 4290 | AUUAGGUUUAAGCUAUAUC | 90.2 | 87.2 |
| 311 | 2955 | AUAUAGCUUAAACCUAAUC | 4291 | GAUUAGGUUUAAGCUAUAU | 59.9 | 56.9 |
| 312 | 2956 | UAUAGCUUAAACCUAAUCC | 4292 | GGAUUAGGUUUAAGCUAUA | 50.2 | 47.2 |
| 313 | 2957 | AUAGCUUAAACCUAAUCCC | 4293 | GGGAUUAGGUUUAAGCUAU | 54.7 | 51.7 |
| 314 | 2958 | UAGCUUAAACCUAAUCCCU | 4294 | AGGGAUUAGGUUUAAGCUA | 66.5 | 63.5 |
| 315 | 2959 | AGCUUAAACCUAAUCCCUC | 4295 | GAGGGAUUAGGUUUAAGCU | 63.9 | 60.9 |
| 316 | 2960 | GCUUAAACCUAAUCCCUCC | 4296 | GGAGGGAUUAGGUUUAAGC | 68.5 | 65.5 |
| 317 | 2961 | CUUAAACCUAAUCCCUCCC | 4297 | GGGAGGGAUUAGGUUUAAG | 52.5 | 49.5 |
| 318 | 2962 | UUAAACCUAAUCCCUCCCG | 4298 | CGGGAGGGAUUAGGUUUAA | 39.9 | 36.9 |
| 319 | 2963 | UAAACCUAAUCCCUCCCGC | 4299 | GCGGGAGGGAUUAGGUUUA | 41.8 | 38.8 |
| 320 | 2964 | AAACCUAAUCCCUCCCGCC | 4300 | GGCGGGAGGGAUUAGGUUU | 45.5 | 42.5 |
| 321 | 2965 | AACCUAAUCCCUCCCGCCC | 4301 | GGGCGGGAGGGAUUAGGUU | 43.6 | 40.6 |
| 322 | 2966 | ACCUAAUCCCUCCCGCCCU | 4302 | AGGGCGGGAGGGAUUAGGU | 59.8 | 56.8 |
| 323 | 2967 | CCUAAUCCCUCCCGCCCUG | 4303 | CAGGGCGGGAGGGAUUAGG | 60.2 | 57.2 |
| 324 | 2968 | CUAAUCCCUCCCGCCCUGA | 4304 | UCAGGGCGGGAGGGAUUAG | 60.3 | 57.3 |
| 325 | 2969 | UAAUCCCUCCCGCCCUGAU | 4305 | AUCAGGGCGGGAGGGAUUA | 55.6 | 52.6 |
| 326 | 2970 | AAUCCCUCCCGCCCUGAUC | 4306 | GAUCAGGGCGGGAGGGAUU | 48 | 45 |
| 327 | 2971 | AUCCCUCCCGCCCUGAUCU | 4307 | AGAUCAGGGCGGGAGGGAU | 52.6 | 49.6 |
| 328 | 2972 | UCCCUCCCGCCCUGAUCUC | 4308 | GAGAUCAGGGCGGGAGGGA | 44 | 41 |
| 329 | 2973 | CCCUCCCGCCCUGAUCUCA | 4309 | UGAGAUCAGGGCGGGAGGG | 66.3 | 63.3 |
| 330 | 2974 | CCUCCCGCCCUGAUCUCAG | 4310 | CUGAGAUCAGGGCGGGAGG | 58.8 | 55.8 |
| 331 | 2975 | CUCCCGCCCUGAUCUCAGG | 4311 | CCUGAGAUCAGGGCGGGAG | 54.1 | 51.1 |
| 332 | 2976 | UCCCGCCCUGAUCUCAGGU | 4312 | ACCUGAGAUCAGGGCGGGA | 48.9 | 45.9 |
| 333 | 2977 | CCCGCCCUGAUCUCAGGUG | 4313 | CACCUGAGAUCAGGGCGGG | 54 | 51 |
| 334 | 2978 | CCGCCCUGAUCUCAGGUGA | 4314 | UCACCUGAGAUCAGGGCGG | 75.9 | 72.9 |
| 335 | 2979 | CGCCCUGAUCUCAGGUGAG | 4315 | CUCACCUGAGAUCAGGGCG | 67.4 | 64.4 |
| 336 | 2980 | GCCCUGAUCUCAGGUGAGC | 4316 | GCUCACCUGAGAUCAGGGC | 57.9 | 54.9 |
| 337 | 2981 | CCCUGAUCUCAGGUGAGCA | 4317 | UGCUCACCUGAGAUCAGGG | 75.6 | 72.6 |
| 338 | 2982 | CCUGAUCUCAGGUGAGCAC | 4318 | GUGCUCACCUGAGAUCAGG | 67.2 | 64.2 |
| 339 | 2983 | CUGAUCUCAGGUGAGCACC | 4319 | GGUGCUCACCUGAGAUCAG | 51.7 | 48.7 |
| 340 | 2984 | UGAUCUCAGGUGAGCACCU | 4320 | AGGUGCUCACCUGAGAUCA | 68.5 | 65.5 |
| 341 | 2985 | GAUCUCAGGUGAGCACCUC | 4321 | GAGGUGCUCACCUGAGAUC | 65.4 | 62.4 |
| 342 | 2986 | AUCUCAGGUGAGCACCUCC | 4322 | GGAGGUGCUCACCUGAGAU | 53 | 50 |
| 343 | 2987 | UCUCAGGUGAGCACCUCCG | 4323 | CGGAGGUGCUCACCUGAGA | 54.3 | 51.3 |
| 344 | 2988 | CUCAGGUGAGCACCUCCGG | 4324 | CCGGAGGUGCUCACCUGAG | 57.8 | 54.8 |
| 345 | 2989 | UCAGGUGAGCACCUCCGGG | 4325 | CCCGGAGGUGCUCACCUGA | 46.8 | 43.8 |
| 346 | 2990 | CAGGUGAGCACCUCCGGGU | 4326 | ACCCGGAGGUGCUCACCUG | 63.8 | 60.8 |
| 347 | 2991 | AGGUGAGCACCUCCGGGUC | 4327 | GACCCGGAGGUGCUCACCU | 59.3 | 56.3 |
| 348 | 2992 | GGUGAGCACCUCCGGGUCU | 4328 | AGACCCGGAGGUGCUCACC | 74.6 | 71.6 |
| 349 | 2993 | GUGAGCACCUCCGGGUCUG | 4329 | CAGACCCGGAGGUGCUCAC | 59.4 | 56.4 |
| 350 | 2994 | UGAGCACCUCCGGGUCUGU | 4330 | ACAGACCCGGAGGUGCUCA | 60.1 | 57.1 |
| 351 | 2995 | GAGCACCUCCGGGUCUGUC | 4331 | GACAGACCCGGAGGUGCUC | 55.9 | 52.9 |
| 352 | 2996 | AGCACCUCCGGGUCUGUCC | 4332 | GGACAGACCCGGAGGUGCU | 53.5 | 50.5 |
| 353 | 2997 | GCACCUCCGGGUCUGUCCC | 4333 | GGGACAGACCCGGAGGUGC | 57.9 | 54.9 |
| 370 | 2998 | CCCAGGAGUACACCUGCUG | 4334 | CAGCAGGUGUACUCCUGGG | 65.9 | 62.9 |
| 371 | 2999 | CCAGGAGUACACCUGCUGU | 4335 | ACAGCAGGUGUACUCCUGG | 75.8 | 72.8 |
| 372 | 3000 | CAGGAGUACACCUGCUGUU | 4336 | AACAGCAGGUGUACUCCUG | 81.1 | 78.1 |
| 373 | 3001 | AGGAGUACACCUGCUGUUC | 4337 | GAACAGCAGGUGUACUCCU | 67.2 | 64.2 |
| 374 | 3002 | GGAGUACACCUGCUGUUCC | 4338 | GGAACAGCAGGUGUACUCC | 70 | 67 |
| 375 | 3003 | GAGUACACCUGCUGUUCCA | 4339 | UGGAACAGCAGGUGUACUC | 89 | 86 |
| 376 | 3004 | AGUACACCUGCUGUUCCAG | 4340 | CUGGAACAGCAGGUGUACU | 66.4 | 63.4 |
| 377 | 3005 | GUACACCUGCUGUUCCAGU | 4341 | ACUGGAACAGCAGGUGUAC | 71.4 | 68.4 |
| 378 | 3006 | UACACCUGCUGUUCCAGUG | 4342 | CACUGGAACAGCAGGUGUA | 61.4 | 58.4 |
| 379 | 3007 | ACACCUGCUGUUCCAGUGA | 4343 | UCACUGGAACAGCAGGUGU | 80.6 | 77.6 |
| 380 | 3008 | CACCUGCUGUUCCAGUGAG | 4344 | CUCACUGGAACAGCAGGUG | 72.5 | 69.5 |
| 381 | 3009 | ACCUGCUGUUCCAGUGAGA | 4345 | UCUCACUGGAACAGCAGGU | 81.7 | 78.7 |
| 382 | 3010 | CCUGCUGUUCCAGUGAGAC | 4346 | GUCUCACUGGAACAGCAGG | 66.3 | 63.3 |
| 383 | 3011 | CUGCUGUUCCAGUGAGACA | 4347 | UGUCUCACUGGAACAGCAG | 84.8 | 81.8 |
| 384 | 3012 | UGCUGUUCCAGUGAGACAG | 4348 | CUGUCUCACUGGAACAGCA | 68.3 | 65.3 |
| 385 | 3013 | GCUGUUCCAGUGAGACAGA | 4349 | UCUGUCUCACUGGAACAGC | 91.8 | 88.8 |
| 386 | 3014 | CUGUUCCAGUGAGACAGAG | 4350 | CUCUGUCUCACUGGAACAG | 68.1 | 65.1 |
| 387 | 3015 | UGUUCCAGUGAGACAGAGC | 4351 | GCUCUGUCUCACUGGAACA | 60 | 57 |
| 388 | 3016 | GUUCCAGUGAGACAGAGCA | 4352 | UGCUCUGUCUCACUGGAAC | 84.3 | 81.3 |
| 389 | 3017 | UUCCAGUGAGACAGAGCAG | 4353 | CUGCUCUGUCUCACUGGAA | 62.3 | 59.3 |
| 390 | 3018 | UCCAGUGAGACAGAGCAGA | 4354 | UCUGCUCUGUCUCACUGGA | 72.7 | 69.7 |
| 391 | 3019 | CCAGUGAGACAGAGCAGAG | 4355 | CUCUGCUCUGUCUCACUGG | 74.9 | 71.9 |
| 392 | 3020 | CAGUGAGACAGAGCAGAGG | 4356 | CCUCUGCUCUGUCUCACUG | 65.9 | 62.9 |
| 393 | 3021 | AGUGAGACAGAGCAGAGGC | 4357 | GCCUCUGCUCUGUCUCACU | 61.3 | 58.3 |
| 394 | 3022 | GUGAGACAGAGCAGAGGCU | 4358 | AGCCUCUGCUCUGUCUCAC | 74 | 71 |
| 395 | 3023 | UGAGACAGAGCAGAGGCUG | 4359 | CAGCCUCUGCUCUGUCUCA | 59.2 | 56.2 |
| 396 | 3024 | GAGACAGAGCAGAGGCUGA | 4360 | UCAGCCUCUGCUCUGUCUC | 87 | 84 |
| 397 | 3025 | AGACAGAGCAGAGGCUGAU | 4361 | AUCAGCCUCUGCUCUGUCU | 77.2 | 74.2 |
| 398 | 3026 | GACAGAGCAGAGGCUGAUC | 4362 | GAUCAGCCUCUGCUCUGUC | 67.5 | 64.5 |
| 399 | 3027 | ACAGAGCAGAGGCUGAUCA | 4363 | UGAUCAGCCUCUGCUCUGU | 76.7 | 73.7 |
| 400 | 3028 | CAGAGCAGAGGCUGAUCAG | 4364 | CUGAUCAGCCUCUGCUCUG | 71.3 | 67.3 |
| 401 | 3029 | AGAGCAGAGGCUGAUCAGG | 4365 | CCUGAUCAGCCUCUGCUCU | 59.5 | 55.5 |
| 402 | 3030 | GAGCAGAGGCUGAUCAGGG | 4366 | CCCUGAUCAGCCUCUGCUC | 59.8 | 55.8 |
| 403 | 3031 | AGCAGAGGCUGAUCAGGGA | 4367 | UCCCUGAUCAGCCUCUGCU | 78.3 | 74.3 |
| 404 | 3032 | GCAGAGGCUGAUCAGGGAG | 4368 | CUCCCUGAUCAGCCUCUGC | 68.1 | 64.1 |
| 405 | 3033 | CAGAGGCUGAUCAGGGAGA | 4369 | UCUCCCUGAUCAGCCUCUG | 76.5 | 72.5 |
| 406 | 3034 | AGAGGCUGAUCAGGGAGAC | 4370 | GUCUCCCUGAUCAGCCUCU | 59.4 | 55.4 |
| 407 | 3035 | GAGGCUGAUCAGGGAGACU | 4371 | AGUCUCCCUGAUCAGCCUC | 70 | 66 |
| 408 | 3036 | AGGCUGAUCAGGGAGACUG | 4372 | CAGUCUCCCUGAUCAGCCU | 60.4 | 56.4 |
| 409 | 3037 | GGCUGAUCAGGGAGACUGA | 4373 | UCAGUCUCCCUGAUCAGCC | 88.9 | 84.9 |
| 410 | 3038 | GCUGAUCAGGGAGACUGAG | 4374 | CUCAGUCUCCCUGAUCAGC | 68.4 | 64.4 |
| 411 | 3039 | CUGAUCAGGGAGACUGAGG | 4375 | CCUCAGUCUCCCUGAUCAG | 53.5 | 49.5 |
| 412 | 3040 | UGAUCAGGGAGACUGAGGC | 4376 | GCCUCAGUCUCCCUGAUCA | 47.3 | 43.3 |
| 413 | 3041 | GAUCAGGGAGACUGAGGCC | 4377 | GGCCUCAGUCUCCCUGAUC | 56 | 52 |
| 430 | 3042 | CCACCUUCCGAGGCCUGGU | 4378 | ACCAGGCCUCGGAAGGUGG | 63.7 | 59.7 |
| 431 | 3043 | CACCUUCCGAGGCCUGGUG | 4379 | CACCAGGCCUCGGAAGGUG | 59.6 | 55.6 |
| 432 | 3044 | ACCUUCCGAGGCCUGGUGG | 4380 | CCACCAGGCCUCGGAAGGU | 49.4 | 45.4 |
| 433 | 3045 | CCUUCCGAGGCCUGGUGGA | 4381 | UCCACCAGGCCUCGGAAGG | 72.5 | 68.5 |
| 434 | 3046 | CUUCCGAGGCCUGGUGGAG | 4382 | CUCCACCAGGCCUCGGAAG | 56.1 | 52.1 |
| 435 | 3047 | UUCCGAGGCCUGGUGGAGG | 4383 | CCUCCACCAGGCCUCGGAA | 38.8 | 34.8 |
| 436 | 3048 | UCCGAGGCCUGGUGGAGGA | 4384 | UCCUCCACCAGGCCUCGGA | 66.5 | 62.5 |
| 437 | 3049 | CCGAGGCCUGGUGGAGGAC | 4385 | GUCCUCCACCAGGCCUCGG | 56.9 | 52.9 |
| 438 | 3050 | CGAGGCCUGGUGGAGGACA | 4386 | UGUCCUCCACCAGGCCUCG | 73.5 | 69.5 |
| 439 | 3051 | GAGGCCUGGUGGAGGACAG | 4387 | CUGUCCUCCACCAGGCCUC | 67 | 63 |
| 440 | 3052 | AGGCCUGGUGGAGGACAGC | 4388 | GCUGUCCUCCACCAGGCCU | 51.2 | 47.2 |
| 441 | 3053 | GGCCUGGUGGAGGACAGCG | 4389 | CGCUGUCCUCCACCAGGCC | 58.8 | 54.8 |
| 442 | 3054 | GCCUGGUGGAGGACAGCGG | 4390 | CCGCUGUCCUCCACCAGGC | 64.2 | 60.2 |
| 443 | 3055 | CCUGGUGGAGGACAGCGGC | 4391 | GCCGCUGUCCUCCACCAGG | 58.4 | 54.4 |
| 444 | 3056 | CUGGUGGAGGACAGCGGCU | 4392 | AGCCGCUGUCCUCCACCAG | 66.2 | 62.2 |
| 445 | 3057 | UGGUGGAGGACAGCGGCUC | 4393 | GAGCCGCUGUCCUCCACCA | 54.8 | 50.8 |
| 446 | 3058 | GGUGGAGGACAGCGGCUCC | 4394 | GGAGCCGCUGUCCUCCACC | 67.4 | 63.4 |
| 447 | 3059 | GUGGAGGACAGCGGCUCCU | 4395 | AGGAGCCGCUGUCCUCCAC | 67.1 | 63.1 |
| 448 | 3060 | UGGAGGACAGCGGCUCCUU | 4396 | AAGGAGCCGCUGUCCUCCA | 68 | 64 |
| 449 | 3061 | GGAGGACAGCGGCUCCUUU | 4397 | AAAGGAGCCGCUGUCCUCC | 83.2 | 79.2 |
| 450 | 3062 | GAGGACAGCGGCUCCUUUC | 4398 | GAAAGGAGCCGCUGUCCUC | 66.6 | 62.6 |
| 451 | 3063 | AGGACAGCGGCUCCUUUCU | 4399 | AGAAAGGAGCCGCUGUCCU | 71.8 | 67.8 |
| 452 | 3064 | GGACAGCGGCUCCUUUCUG | 4400 | CAGAAAGGAGCCGCUGUCC | 72.2 | 68.2 |
| 453 | 3065 | GACAGCGGCUCCUUUCUGG | 4401 | CCAGAAAGGAGCCGCUGUC | 62.8 | 58.8 |
| 454 | 3066 | ACAGCGGCUCCUUUCUGGU | 4402 | ACCAGAAAGGAGCCGCUGU | 64.8 | 60.8 |
| 455 | 3067 | CAGCGGCUCCUUUCUGGUU | 4403 | AACCAGAAAGGAGCCGCUG | 76.9 | 72.9 |
| 456 | 3068 | AGCGGCUCCUUUCUGGUUC | 4404 | GAACCAGAAAGGAGCCGCU | 62.8 | 58.8 |
| 457 | 3069 | GCGGCUCCUUUCUGGUUCA | 4405 | UGAACCAGAAAGGAGCCGC | 88.2 | 84.2 |
| 458 | 3070 | CGGCUCCUUUCUGGUUCAC | 4406 | GUGAACCAGAAAGGAGCCG | 65.9 | 61.9 |
| 459 | 3071 | GGCUCCUUUCUGGUUCACA | 4407 | UGUGAACCAGAAAGGAGCC | 80.4 | 76.4 |
| 460 | 3072 | GCUCCUUUCUGGUUCACAC | 4408 | GUGUGAACCAGAAAGGAGC | 76.2 | 72.2 |
| 513 | 3073 | UUUCUGGAGAUGCUCUCAG | 4409 | CUGAGAGCAUCUCCAGAAA | 55.3 | 50.3 |
| 514 | 3074 | UUCUGGAGAUGCUCUCAGU | 4410 | ACUGAGAGCAUCUCCAGAA | 69 | 64 |
| 515 | 3075 | UCUGGAGAUGCUCUCAGUA | 4411 | UACUGAGAGCAUCUCCAGA | 78.9 | 73.9 |
| 516 | 3076 | CUGGAGAUGCUCUCAGUAG | 4412 | CUACUGAGAGCAUCUCCAG | 73 | 68 |
| 517 | 3077 | UGGAGAUGCUCUCAGUAGC | 4413 | GCUACUGAGAGCAUCUCCA | 64.1 | 59.1 |
| 518 | 3078 | GGAGAUGCUCUCAGUAGCC | 4414 | GGCUACUGAGAGCAUCUCC | 68.6 | 63.6 |
| 519 | 3079 | GAGAUGCUCUCAGUAGCCC | 4415 | GGGCUACUGAGAGCAUCUC | 60.2 | 55.2 |
| 520 | 3080 | AGAUGCUCUCAGUAGCCCA | 4416 | UGGGCUACUGAGAGCAUCU | 81 | 76 |
| 521 | 3081 | GAUGCUCUCAGUAGCCCAG | 4417 | CUGGGCUACUGAGAGCAUC | 71.5 | 66.5 |
| 522 | 3082 | AUGCUCUCAGUAGCCCAGC | 4418 | GCUGGGCUACUGAGAGCAU | 43.7 | 38.7 |
| 523 | 3083 | UGCUCUCAGUAGCCCAGCA | 4419 | UGCUGGGCUACUGAGAGCA | 74.4 | 69.4 |
| 524 | 3084 | GCUCUCAGUAGCCCAGCAC | 4420 | GUGCUGGGCUACUGAGAGC | 65.2 | 60.2 |
| 525 | 3085 | CUCUCAGUAGCCCAGCACU | 4421 | AGUGCUGGGCUACUGAGAG | 69.9 | 64.9 |
| 526 | 3086 | UCUCAGUAGCCCAGCACUC | 4422 | GAGUGCUGGGCUACUGAGA | 57.8 | 52.8 |
| 527 | 3087 | CUCAGUAGCCCAGCACUCU | 4423 | AGAGUGCUGGGCUACUGAG | 67.5 | 62.5 |
| 528 | 3088 | UCAGUAGCCCAGCACUCUC | 4424 | GAGAGUGCUGGGCUACUGA | 57.4 | 52.4 |
| 529 | 3089 | CAGUAGCCCAGCACUCUCU | 4425 | AGAGAGUGCUGGGCUACUG | 73.5 | 68.5 |
| 530 | 3090 | AGUAGCCCAGCACUCUCUG | 4426 | CAGAGAGUGCUGGGCUACU | 61.1 | 56.1 |
| 531 | 3091 | GUAGCCCAGCACUCUCUGA | 4427 | UCAGAGAGUGCUGGGCUAC | 74.8 | 69.8 |
| 532 | 3092 | UAGCCCAGCACUCUCUGAC | 4428 | GUCAGAGAGUGCUGGGCUA | 47.3 | 42.3 |
| 533 | 3093 | AGCCCAGCACUCUCUGACC | 4429 | GGUCAGAGAGUGCUGGGCU | 55.5 | 50.5 |
| 534 | 3094 | GCCCAGCACUCUCUGACCC | 4430 | GGGUCAGAGAGUGCUGGGC | 58.1 | 53.1 |
| 535 | 3095 | CCCAGCACUCUCUGACCCA | 4431 | UGGGUCAGAGAGUGCUGGG | 75.1 | 70.1 |
| 536 | 3096 | CCAGCACUCUCUGACCCAG | 4432 | CUGGGUCAGAGAGUGCUGG | 67 | 62 |
| 537 | 3097 | CAGCACUCUCUGACCCAGC | 4433 | GCUGGGUCAGAGAGUGCUG | 57.1 | 52.1 |
| 538 | 3098 | AGCACUCUCUGACCCAGCU | 4434 | AGCUGGGUCAGAGAGUGCU | 70.9 | 65.9 |
| 539 | 3099 | GCACUCUCUGACCCAGCUC | 4435 | GAGCUGGGUCAGAGAGUGC | 65.2 | 60.2 |
| 540 | 3100 | CACUCUCUGACCCAGCUCU | 4436 | AGAGCUGGGUCAGAGAGUG | 72.1 | 67.1 |
| 541 | 3101 | ACUCUCUGACCCAGCUCUU | 4437 | AAGAGCUGGGUCAGAGAGU | 73 | 68 |
| 542 | 3102 | CUCUCUGACCCAGCUCUUC | 4438 | GAAGAGCUGGGUCAGAGAG | 61 | 56 |
| 543 | 3103 | UCUCUGACCCAGCUCUUCU | 4439 | AGAAGAGCUGGGUCAGAGA | 65 | 60 |
| 544 | 3104 | CUCUGACCCAGCUCUUCUC | 4440 | GAGAAGAGCUGGGUCAGAG | 63.7 | 58.7 |
| 545 | 3105 | UCUGACCCAGCUCUUCUCC | 4441 | GGAGAAGAGCUGGGUCAGA | 46.8 | 41.8 |
| 546 | 3106 | CUGACCCAGCUCUUCUCCC | 4442 | GGGAGAAGAGCUGGGUCAG | 50.1 | 45.1 |
| 547 | 3107 | UGACCCAGCUCUUCUCCCA | 4443 | UGGGAGAAGAGCUGGGUCA | 72 | 67 |
| 548 | 3108 | GACCCAGCUCUUCUCCCAC | 4444 | GUGGGAGAAGAGCUGGGUC | 64.9 | 59.9 |
| 549 | 3109 | ACCCAGCUCUUCUCCCACU | 4445 | AGUGGGAGAAGAGCUGGGU | 67.9 | 62.9 |
| 550 | 3110 | CCCAGCUCUUCUCCCACUC | 4446 | GAGUGGGAGAAGAGCUGGG | 63.1 | 58.1 |
| 551 | 3111 | CCAGCUCUUCUCCCACUCC | 4447 | GGAGUGGGAGAAGAGCUGG | 60.7 | 55.7 |
| 552 | 3112 | CAGCUCUUCUCCCACUCCU | 4448 | AGGAGUGGGAGAAGAGCUG | 72.9 | 67.9 |
| 553 | 3113 | AGCUCUUCUCCCACUCCUA | 4449 | UAGGAGUGGGAGAAGAGCU | 87.4 | 82.4 |
| 554 | 3114 | GCUCUUCUCCCACUCCUAC | 4450 | GUAGGAGUGGGAGAAGAGC | 70.5 | 65.5 |
| 555 | 3115 | CUCUUCUCCCACUCCUACG | 4451 | CGUAGGAGUGGGAGAAGAG | 59.4 | 54.4 |
| 556 | 3116 | UCUUCUCCCACUCCUACGG | 4452 | CCGUAGGAGUGGGAGAAGA | 52.1 | 47.1 |
| 557 | 3117 | CUUCUCCCACUCCUACGGC | 4453 | GCCGUAGGAGUGGGAGAAG | 47.5 | 42.5 |
| 558 | 3118 | UUCUCCCACUCCUACGGCC | 4454 | GGCCGUAGGAGUGGGAGAA | 39.7 | 34.7 |
| 559 | 3119 | UCUCCCACUCCUACGGCCG | 4455 | CGGCCGUAGGAGUGGGAGA | 46 | 41 |
| 560 | 3120 | CUCCCACUCCUACGGCCGC | 4456 | GCGGCCGUAGGAGUGGGAG | 47.5 | 42.5 |
| 561 | 3121 | UCCCACUCCUACGGCCGCC | 4457 | GGCGGCCGUAGGAGUGGGA | 34.9 | 29.9 |
| 562 | 3122 | CCCACUCCUACGGCCGCCU | 4458 | AGGCGGCCGUAGGAGUGGG | 55.9 | 50.9 |
| 563 | 3123 | CCACUCCUACGGCCGCCUG | 4459 | CAGGCGGCCGUAGGAGUGG | 56.4 | 51.4 |
| 564 | 3124 | CACUCCUACGGCCGCCUGU | 4460 | ACAGGCGGCCGUAGGAGUG | 63.9 | 58.9 |
| 565 | 3125 | ACUCCUACGGCCGCCUGUA | 4461 | UACAGGCGGCCGUAGGAGU | 69.9 | 64.9 |
| 566 | 3126 | CUCCUACGGCCGCCUGUAU | 4462 | AUACAGGCGGCCGUAGGAG | 68.7 | 63.7 |
| 567 | 3127 | UCCUACGGCCGCCUGUAUG | 4463 | CAUACAGGCGGCCGUAGGA | 50.2 | 45.2 |
| 568 | 3128 | CCUACGGCCGCCUGUAUGC | 4464 | GCAUACAGGCGGCCGUAGG | 54.5 | 49.5 |
| 569 | 3129 | CUACGGCCGCCUGUAUGCC | 4465 | GGCAUACAGGCGGCCGUAG | 43.2 | 38.2 |
| 570 | 3130 | UACGGCCGCCUGUAUGCCC | 4466 | GGGCAUACAGGCGGCCGUA | 36.1 | 31.1 |
| 571 | 3131 | ACGGCCGCCUGUAUGCCCA | 4467 | UGGGCAUACAGGCGGCCGU | 62.2 | 57.2 |
| 572 | 3132 | CGGCCGCCUGUAUGCCCAG | 4468 | CUGGGCAUACAGGCGGCCG | 59.8 | 54.8 |
| 573 | 3133 | GGCCGCCUGUAUGCCCAGC | 4469 | GCUGGGCAUACAGGCGGCC | 49 | 44 |
| 574 | 3134 | GCCGCCUGUAUGCCCAGCA | 4470 | UGCUGGGCAUACAGGCGGC | 66.7 | 61.7 |
| 575 | 3135 | CCGCCUGUAUGCCCAGCAC | 4471 | GUGCUGGGCAUACAGGCGG | 63.2 | 58.2 |
| 576 | 3136 | CGCCUGUAUGCCCAGCACG | 4472 | CGUGCUGGGCAUACAGGCG | 60.2 | 55.2 |
| 577 | 3137 | GCCUGUAUGCCCAGCACGC | 4473 | GCGUGCUGGGCAUACAGGC | 59.2 | 54.2 |
| 578 | 3138 | CCUGUAUGCCCAGCACGCC | 4474 | GGCGUGCUGGGCAUACAGG | 49.6 | 44.6 |
| 579 | 3139 | CUGUAUGCCCAGCACGCCC | 4475 | GGGCGUGCUGGGCAUACAG | 50.3 | 45.3 |
| 580 | 3140 | UGUAUGCCCAGCACGCCCU | 4476 | AGGGCGUGCUGGGCAUACA | 57.5 | 52.5 |
| 581 | 3141 | GUAUGCCCAGCACGCCCUC | 4477 | GAGGGCGUGCUGGGCAUAC | 53.3 | 48.3 |
| 582 | 3142 | UAUGCCCAGCACGCCCUCA | 4478 | UGAGGGCGUGCUGGGCAUA | 55.6 | 50.6 |
| 583 | 3143 | AUGCCCAGCACGCCCUCAU | 4479 | AUGAGGGCGUGCUGGGCAU | 56.7 | 51.7 |
| 584 | 3144 | UGCCCAGCACGCCCUCAUA | 4480 | UAUGAGGGCGUGCUGGGCA | 71.7 | 66.7 |
| 585 | 3145 | GCCCAGCACGCCCUCAUAU | 4481 | AUAUGAGGGCGUGCUGGGC | 71.9 | 66.9 |
| 586 | 3146 | CCCAGCACGCCCUCAUAUU | 4482 | AAUAUGAGGGCGUGCUGGG | 70.6 | 65.6 |
| 587 | 3147 | CCAGCACGCCCUCAUAUUC | 4483 | GAAUAUGAGGGCGUGCUGG | 62.6 | 57.6 |
| 588 | 3148 | CAGCACGCCCUCAUAUUCA | 4484 | UGAAUAUGAGGGCGUGCUG | 74.8 | 69.8 |
| 589 | 3149 | AGCACGCCCUCAUAUUCAA | 4485 | UUGAAUAUGAGGGCGUGCU | 85.4 | 80.4 |
| 590 | 3150 | GCACGCCCUCAUAUUCAAU | 4486 | AUUGAAUAUGAGGGCGUGC | 77.1 | 72.1 |
| 591 | 3151 | CACGCCCUCAUAUUCAAUG | 4487 | CAUUGAAUAUGAGGGCGUG | 58.6 | 53.6 |
| 592 | 3152 | ACGCCCUCAUAUUCAAUGG | 4488 | CCAUUGAAUAUGAGGGCGU | 56.9 | 51.9 |
| 609 | 3153 | GGCCUGUUCUCUCGGCUGC | 4489 | GCAGCCGAGAGAACAGGCC | 64.9 | 58.9 |
| 610 | 3154 | GCCUGUUCUCUCGGCUGCG | 4490 | CGCAGCCGAGAGAACAGGC | 62.3 | 56.3 |
| 611 | 3155 | CCUGUUCUCUCGGCUGCGA | 4491 | UCGCAGCCGAGAGAACAGG | 80.9 | 74.9 |
| 612 | 3156 | CUGUUCUCUCGGCUGCGAG | 4492 | CUCGCAGCCGAGAGAACAG | 63.8 | 57.8 |
| 613 | 3157 | UGUUCUCUCGGCUGCGAGA | 4493 | UCUCGCAGCCGAGAGAACA | 79.7 | 73.7 |
| 614 | 3158 | GUUCUCUCGGCUGCGAGAC | 4494 | GUCUCGCAGCCGAGAGAAC | 60.6 | 54.6 |
| 615 | 3159 | UUCUCUCGGCUGCGAGACU | 4495 | AGUCUCGCAGCCGAGAGAA | 61.3 | 55.3 |
| 616 | 3160 | UCUCUCGGCUGCGAGACUU | 4496 | AAGUCUCGCAGCCGAGAGA | 68.1 | 62.1 |
| 617 | 3161 | CUCUCGGCUGCGAGACUUC | 4497 | GAAGUCUCGCAGCCGAGAG | 67 | 61 |
| 618 | 3162 | UCUCGGCUGCGAGACUUCU | 4498 | AGAAGUCUCGCAGCCGAGA | 67.5 | 61.5 |
| 619 | 3163 | CUCGGCUGCGAGACUUCUA | 4499 | UAGAAGUCUCGCAGCCGAG | 85.8 | 79.8 |
| 620 | 3164 | UCGGCUGCGAGACUUCUAU | 4500 | AUAGAAGUCUCGCAGCCGA | 73.5 | 67.5 |
| 621 | 3165 | CGGCUGCGAGACUUCUAUG | 4501 | CAUAGAAGUCUCGCAGCCG | 76.6 | 70.6 |
| 622 | 3166 | GGCUGCGAGACUUCUAUGG | 4502 | CCAUAGAAGUCUCGCAGCC | 71.5 | 65.5 |
| 623 | 3167 | GCUGCGAGACUUCUAUGGG | 4503 | CCCAUAGAAGUCUCGCAGC | 68.4 | 62.4 |
| 654 | 3168 | GGGUUGGAUGACACCCUGG | 4504 | CCAGGGUGUCAUCCAACCC | 69.4 | 63.4 |
| 671 | 3169 | GGCGGAUUUCUGGGCACAG | 4505 | CUGUGCCCAGAAAUCCGCC | 67.2 | 61.2 |
| 672 | 3170 | GCGGAUUUCUGGGCACAGC | 4506 | GCUGUGCCCAGAAAUCCGC | 60.3 | 54.3 |
| 673 | 3171 | CGGAUUUCUGGGCACAGCU | 4507 | AGCUGUGCCCAGAAAUCCG | 72.2 | 66.2 |
| 674 | 3172 | GGAUUUCUGGGCACAGCUC | 4508 | GAGCUGUGCCCAGAAAUCC | 70 | 64 |
| 675 | 3173 | GAUUUCUGGGCACAGCUCC | 4509 | GGAGCUGUGCCCAGAAAUC | 58.3 | 52.3 |
| 676 | 3174 | AUUUCUGGGCACAGCUCCU | 4510 | AGGAGCUGUGCCCAGAAAU | 62.8 | 56.8 |
| 677 | 3175 | UUUCUGGGCACAGCUCCUG | 4511 | CAGGAGCUGUGCCCAGAAA | 45 | 39 |
| 678 | 3176 | UUCUGGGCACAGCUCCUGG | 4512 | CCAGGAGCUGUGCCCAGAA | 46.3 | 40.3 |
| 679 | 3177 | UCUGGGCACAGCUCCUGGA | 4513 | UCCAGGAGCUGUGCCCAGA | 65.8 | 59.8 |
| 680 | 3178 | CUGGGCACAGCUCCUGGAG | 4514 | CUCCAGGAGCUGUGCCCAG | 56.3 | 50.3 |
| 681 | 3179 | UGGGCACAGCUCCUGGAGA | 4515 | UCUCCAGGAGCUGUGCCCA | 68.2 | 62.2 |
| 682 | 3180 | GGGCACAGCUCCUGGAGAG | 4516 | CUCUCCAGGAGCUGUGCCC | 69.4 | 63.4 |
| 683 | 3181 | GGCACAGCUCCUGGAGAGA | 4517 | UCUCUCCAGGAGCUGUGCC | 82.4 | 76.4 |
| 684 | 3182 | GCACAGCUCCUGGAGAGAG | 4518 | CUCUCUCCAGGAGCUGUGC | 69.3 | 63.3 |
| 685 | 3183 | CACAGCUCCUGGAGAGAGU | 4519 | ACUCUCUCCAGGAGCUGUG | 75.9 | 69.9 |
| 686 | 3184 | ACAGCUCCUGGAGAGAGUG | 4520 | CACUCUCUCCAGGAGCUGU | 62.3 | 56.3 |
| 687 | 3185 | CAGCUCCUGGAGAGAGUGU | 4521 | ACACUCUCUCCAGGAGCUG | 73.3 | 67.3 |
| 688 | 3186 | AGCUCCUGGAGAGAGUGUU | 4522 | AACACUCUCUCCAGGAGCU | 74.9 | 68.9 |
| 689 | 3187 | GCUCCUGGAGAGAGUGUUC | 4523 | GAACACUCUCUCCAGGAGC | 76.9 | 70.9 |
| 690 | 3188 | CUCCUGGAGAGAGUGUUCC | 4524 | GGAACACUCUCUCCAGGAG | 56.9 | 50.9 |
| 691 | 3189 | UCCUGGAGAGAGUGUUCCC | 4525 | GGGAACACUCUCUCCAGGA | 57.6 | 51.6 |
| 692 | 3190 | CCUGGAGAGAGUGUUCCCG | 4526 | CGGGAACACUCUCUCCAGG | 61.3 | 55.3 |
| 693 | 3191 | CUGGAGAGAGUGUUCCCGC | 4527 | GCGGGAACACUCUCUCCAG | 56.6 | 50.6 |
| 694 | 3192 | UGGAGAGAGUGUUCCCGCU | 4528 | AGCGGGAACACUCUCUCCA | 71.5 | 65.5 |
| 695 | 3193 | GGAGAGAGUGUUCCCGCUG | 4529 | CAGCGGGAACACUCUCUCC | 75.5 | 69.5 |
| 696 | 3194 | GAGAGAGUGUUCCCGCUGC | 4530 | GCAGCGGGAACACUCUCUC | 67.8 | 61.8 |
| 697 | 3195 | AGAGAGUGUUCCCGCUGCU | 4531 | AGCAGCGGGAACACUCUCU | 76.9 | 70.9 |
| 698 | 3196 | GAGAGUGUUCCCGCUGCUG | 4532 | CAGCAGCGGGAACACUCUC | 69.4 | 63.4 |
| 699 | 3197 | AGAGUGUUCCCGCUGCUGC | 4533 | GCAGCAGCGGGAACACUCU | 60.3 | 54.3 |
| 700 | 3198 | GAGUGUUCCCGCUGCUGCA | 4534 | UGCAGCAGCGGGAACACUC | 86.8 | 79.8 |
| 701 | 3199 | AGUGUUCCCGCUGCUGCAC | 4535 | GUGCAGCAGCGGGAACACU | 61.8 | 54.8 |
| 702 | 3200 | GUGUUCCCGCUGCUGCACC | 4536 | GGUGCAGCAGCGGGAACAC | 54.1 | 47.1 |
| 703 | 3201 | UGUUCCCGCUGCUGCACCC | 4537 | GGGUGCAGCAGCGGGAACA | 52.9 | 45.9 |
| 704 | 3202 | GUUCCCGCUGCUGCACCCA | 4538 | UGGGUGCAGCAGCGGGAAC | 69.3 | 62.3 |
| 705 | 3203 | UUCCCGCUGCUGCACCCAC | 4539 | GUGGGUGCAGCAGCGGGAA | 47.3 | 40.3 |
| 706 | 3204 | UCCCGCUGCUGCACCCACA | 4540 | UGUGGGUGCAGCAGCGGGA | 68.5 | 61.5 |
| 707 | 3205 | CCCGCUGCUGCACCCACAG | 4541 | CUGUGGGUGCAGCAGCGGG | 64.6 | 57.6 |
| 708 | 3206 | CCGCUGCUGCACCCACAGU | 4542 | ACUGUGGGUGCAGCAGCGG | 70.4 | 63.4 |
| 709 | 3207 | CGCUGCUGCACCCACAGUA | 4543 | UACUGUGGGUGCAGCAGCG | 83.9 | 76.9 |
| 710 | 3208 | GCUGCUGCACCCACAGUAC | 4544 | GUACUGUGGGUGCAGCAGC | 74.2 | 67.2 |
| 711 | 3209 | CUGCUGCACCCACAGUACA | 4545 | UGUACUGUGGGUGCAGCAG | 79.4 | 72.4 |
| 712 | 3210 | UGCUGCACCCACAGUACAG | 4546 | CUGUACUGUGGGUGCAGCA | 64.7 | 57.7 |
| 713 | 3211 | GCUGCACCCACAGUACAGC | 4547 | GCUGUACUGUGGGUGCAGC | 58.4 | 51.4 |
| 714 | 3212 | CUGCACCCACAGUACAGCU | 4548 | AGCUGUACUGUGGGUGCAG | 67.7 | 60.7 |
| 715 | 3213 | UGCACCCACAGUACAGCUU | 4549 | AAGCUGUACUGUGGGUGCA | 70.2 | 63.2 |
| 716 | 3214 | GCACCCACAGUACAGCUUC | 4550 | GAAGCUGUACUGUGGGUGC | 70.3 | 63.3 |
| 717 | 3215 | CACCCACAGUACAGCUUCC | 4551 | GGAAGCUGUACUGUGGGUG | 67 | 60 |
| 718 | 3216 | ACCCACAGUACAGCUUCCC | 4552 | GGGAAGCUGUACUGUGGGU | 49.1 | 42.1 |
| 737 | 3217 | CCCUGACUACCUGCUCUGC | 4553 | GCAGAGCAGGUAGUCAGGG | 59.5 | 52.5 |
| 738 | 3218 | CCUGACUACCUGCUCUGCC | 4554 | GGCAGAGCAGGUAGUCAGG | 54.5 | 47.5 |
| 739 | 3219 | CUGACUACCUGCUCUGCCU | 4555 | AGGCAGAGCAGGUAGUCAG | 72 | 65 |
| 740 | 3220 | UGACUACCUGCUCUGCCUC | 4556 | GAGGCAGAGCAGGUAGUCA | 56.6 | 49.6 |
| 741 | 3221 | GACUACCUGCUCUGCCUCU | 4557 | AGAGGCAGAGCAGGUAGUC | 73.1 | 66.1 |
| 742 | 3222 | ACUACCUGCUCUGCCUCUC | 4558 | GAGAGGCAGAGCAGGUAGU | 56.7 | 49.7 |
| 743 | 3223 | CUACCUGCUCUGCCUCUCA | 4559 | UGAGAGGCAGAGCAGGUAG | 77.8 | 70.8 |
| 744 | 3224 | UACCUGCUCUGCCUCUCAC | 4560 | GUGAGAGGCAGAGCAGGUA | 56 | 49 |
| 745 | 3225 | ACCUGCUCUGCCUCUCACG | 4561 | CGUGAGAGGCAGAGCAGGU | 55.2 | 48.2 |
| 746 | 3226 | CCUGCUCUGCCUCUCACGC | 4562 | GCGUGAGAGGCAGAGCAGG | 54.3 | 47.3 |
| 747 | 3227 | CUGCUCUGCCUCUCACGCU | 4563 | AGCGUGAGAGGCAGAGCAG | 62.6 | 55.6 |
| 748 | 3228 | UGCUCUGCCUCUCACGCUU | 4564 | AAGCGUGAGAGGCAGAGCA | 73 | 66 |
| 749 | 3229 | GCUCUGCCUCUCACGCUUG | 4565 | CAAGCGUGAGAGGCAGAGC | 70.9 | 63.9 |
| 750 | 3230 | CUCUGCCUCUCACGCUUGG | 4566 | CCAAGCGUGAGAGGCAGAG | 57.8 | 50.8 |
| 783 | 3231 | GGCUCUCUGCAGCCCUUUG | 4567 | CAAAGGGCUGCAGAGAGCC | 71.6 | 64.6 |
| 784 | 3232 | GCUCUCUGCAGCCCUUUGG | 4568 | CCAAAGGGCUGCAGAGAGC | 60.5 | 53.5 |
| 785 | 3233 | CUCUCUGCAGCCCUUUGGG | 4569 | CCCAAAGGGCUGCAGAGAG | 50.4 | 43.4 |
| 811 | 3234 | CCCGCCGCCUCCGCCUGCA | 4570 | UGCAGGCGGAGGCGGCGGG | 57.3 | 49.3 |
| 812 | 3235 | CCGCCGCCUCCGCCUGCAG | 4571 | CUGCAGGCGGAGGCGGCGG | 53.3 | 45.3 |
| 813 | 3236 | CGCCGCCUCCGCCUGCAGA | 4572 | UCUGCAGGCGGAGGCGGCG | 66.1 | 58.1 |
| 814 | 3237 | GCCGCCUCCGCCUGCAGAU | 4573 | AUCUGCAGGCGGAGGCGGC | 66.9 | 58.9 |
| 815 | 3238 | CCGCCUCCGCCUGCAGAUA | 4574 | UAUCUGCAGGCGGAGGCGG | 74.5 | 66.5 |
| 816 | 3239 | CGCCUCCGCCUGCAGAUAA | 4575 | UUAUCUGCAGGCGGAGGCG | 80.1 | 72.1 |
| 817 | 3240 | GCCUCCGCCUGCAGAUAAC | 4576 | GUUAUCUGCAGGCGGAGGC | 66.1 | 58.1 |
| 818 | 3241 | CCUCCGCCUGCAGAUAACC | 4577 | GGUUAUCUGCAGGCGGAGG | 53.1 | 45.1 |
| 819 | 3242 | CUCCGCCUGCAGAUAACCC | 4578 | GGGUUAUCUGCAGGCGGAG | 48.2 | 40.2 |
| 820 | 3243 | UCCGCCUGCAGAUAACCCG | 4579 | CGGGUUAUCUGCAGGCGGA | 45.8 | 37.8 |
| 821 | 3244 | CCGCCUGCAGAUAACCCGG | 4580 | CCGGGUUAUCUGCAGGCGG | 58.2 | 50.2 |
| 822 | 3245 | CGCCUGCAGAUAACCCGGA | 4581 | UCCGGGUUAUCUGCAGGCG | 73.7 | 65.7 |
| 823 | 3246 | GCCUGCAGAUAACCCGGAC | 4582 | GUCCGGGUUAUCUGCAGGC | 65.5 | 57.5 |
| 824 | 3247 | CCUGCAGAUAACCCGGACC | 4583 | GGUCCGGGUUAUCUGCAGG | 57.6 | 49.6 |
| 825 | 3248 | CUGCAGAUAACCCGGACCC | 4584 | GGGUCCGGGUUAUCUGCAG | 53.2 | 45.2 |
| 826 | 3249 | UGCAGAUAACCCGGACCCU | 4585 | AGGGUCCGGGUUAUCUGCA | 62.9 | 54.9 |
| 827 | 3250 | GCAGAUAACCCGGACCCUG | 4586 | CAGGGUCCGGGUUAUCUGC | 66.7 | 58.7 |
| 828 | 3251 | CAGAUAACCCGGACCCUGG | 4587 | CCAGGGUCCGGGUUAUCUG | 61.3 | 53.3 |
| 829 | 3252 | AGAUAACCCGGACCCUGGU | 4588 | ACCAGGGUCCGGGUUAUCU | 67.4 | 59.4 |
| 830 | 3253 | GAUAACCCGGACCCUGGUG | 4589 | CACCAGGGUCCGGGUUAUC | 59.2 | 51.2 |
| 831 | 3254 | AUAACCCGGACCCUGGUGG | 4590 | CCACCAGGGUCCGGGUUAU | 40.4 | 32.4 |
| 848 | 3255 | GGCUGCCCGAGCCUUUGUG | 4591 | CACAAAGGCUCGGGCAGCC | 62.5 | 54.5 |
| 849 | 3256 | GCUGCCCGAGCCUUUGUGC | 4592 | GCACAAAGGCUCGGGCAGC | 55.7 | 47.7 |
| 850 | 3257 | CUGCCCGAGCCUUUGUGCA | 4593 | UGCACAAAGGCUCGGGCAG | 68 | 60 |
| 851 | 3258 | UGCCCGAGCCUUUGUGCAG | 4594 | CUGCACAAAGGCUCGGGCA | 59.8 | 51.8 |
| 852 | 3259 | GCCCGAGCCUUUGUGCAGG | 4595 | CCUGCACAAAGGCUCGGGC | 59.3 | 51.3 |
| 853 | 3260 | CCCGAGCCUUUGUGCAGGG | 4596 | CCCUGCACAAAGGCUCGGG | 58 | 50 |
| 854 | 3261 | CCGAGCCUUUGUGCAGGGC | 4597 | GCCCUGCACAAAGGCUCGG | 50 | 42 |
| 855 | 3262 | CGAGCCUUUGUGCAGGGCC | 4598 | GGCCCUGCACAAAGGCUCG | 52.5 | 44.5 |
| 856 | 3263 | GAGCCUUUGUGCAGGGCCU | 4599 | AGGCCCUGCACAAAGGCUC | 71 | 63 |
| 857 | 3264 | AGCCUUUGUGCAGGGCCUG | 4600 | CAGGCCCUGCACAAAGGCU | 54.6 | 46.6 |
| 858 | 3265 | GCCUUUGUGCAGGGCCUGG | 4601 | CCAGGCCCUGCACAAAGGC | 54.8 | 46.8 |
| 859 | 3266 | CCUUUGUGCAGGGCCUGGA | 4602 | UCCAGGCCCUGCACAAAGG | 69.4 | 61.4 |
| 860 | 3267 | CUUUGUGCAGGGCCUGGAG | 4603 | CUCCAGGCCCUGCACAAAG | 59.8 | 51.8 |
| 861 | 3268 | UUUGUGCAGGGCCUGGAGA | 4604 | UCUCCAGGCCCUGCACAAA | 58.5 | 50.5 |
| 862 | 3269 | UUGUGCAGGGCCUGGAGAC | 4605 | GUCUCCAGGCCCUGCACAA | 45.8 | 37.8 |
| 863 | 3270 | UGUGCAGGGCCUGGAGACU | 4606 | AGUCUCCAGGCCCUGCACA | 59.3 | 51.3 |
| 864 | 3271 | GUGCAGGGCCUGGAGACUG | 4607 | CAGUCUCCAGGCCCUGCAC | 58.3 | 50.3 |
| 865 | 3272 | UGCAGGGCCUGGAGACUGG | 4608 | CCAGUCUCCAGGCCCUGCA | 54.8 | 46.8 |
| 866 | 3273 | GCAGGGCCUGGAGACUGGA | 4609 | UCCAGUCUCCAGGCCCUGC | 73.5 | 65.5 |
| 867 | 3274 | CAGGGCCUGGAGACUGGAA | 4610 | UUCCAGUCUCCAGGCCCUG | 75.3 | 67.3 |
| 868 | 3275 | AGGGCCUGGAGACUGGAAG | 4611 | CUUCCAGUCUCCAGGCCCU | 55.4 | 47.4 |
| 869 | 3276 | GGGCCUGGAGACUGGAAGA | 4612 | UCUUCCAGUCUCCAGGCCC | 81.8 | 73.8 |
| 870 | 3277 | GGCCUGGAGACUGGAAGAA | 4613 | UUCUUCCAGUCUCCAGGCC | 83.1 | 75.1 |
| 871 | 3278 | GCCUGGAGACUGGAAGAAA | 4614 | UUUCUUCCAGUCUCCAGGC | 89 | 81 |
| 872 | 3279 | CCUGGAGACUGGAAGAAAU | 4615 | AUUUCUUCCAGUCUCCAGG | 87.9 | 79.9 |
| 873 | 3280 | CUGGAGACUGGAAGAAAUG | 4616 | CAUUUCUUCCAGUCUCCAG | 70.4 | 62.4 |
| 874 | 3281 | UGGAGACUGGAAGAAAUGU | 4617 | ACAUUUCUUCCAGUCUCCA | 69.7 | 61.7 |
| 875 | 3282 | GGAGACUGGAAGAAAUGUG | 4618 | CACAUUUCUUCCAGUCUCC | 76.2 | 68.2 |
| 876 | 3283 | GAGACUGGAAGAAAUGUGG | 4619 | CCACAUUUCUUCCAGUCUC | 71.5 | 63.5 |
| 877 | 3284 | AGACUGGAAGAAAUGUGGU | 4620 | ACCACAUUUCUUCCAGUCU | 75.1 | 67.1 |
| 878 | 3285 | GACUGGAAGAAAUGUGGUC | 4621 | GACCACAUUUCUUCCAGUC | 70.9 | 62.9 |
| 879 | 3286 | ACUGGAAGAAAUGUGGUCA | 4622 | UGACCACAUUUCUUCCAGU | 76.1 | 68.1 |
| 880 | 3287 | CUGGAAGAAAUGUGGUCAG | 4623 | CUGACCACAUUUCUUCCAG | 70.2 | 62.2 |
| 881 | 3288 | UGGAAGAAAUGUGGUCAGC | 4624 | GCUGACCACAUUUCUUCCA | 58.3 | 50.3 |
| 882 | 3289 | GGAAGAAAUGUGGUCAGCG | 4625 | CGCUGACCACAUUUCUUCC | 67.6 | 59.6 |
| 883 | 3290 | GAAGAAAUGUGGUCAGCGA | 4626 | UCGCUGACCACAUUUCUUC | 93.7 | 85.7 |
| 884 | 3291 | AAGAAAUGUGGUCAGCGAA | 4627 | UUCGCUGACCACAUUUCUU | 88.1 | 80.1 |
| 885 | 3292 | AGAAAUGUGGUCAGCGAAG | 4628 | CUUCGCUGACCACAUUUCU | 74.9 | 66.9 |
| 886 | 3293 | GAAAUGUGGUCAGCGAAGC | 4629 | GCUUCGCUGACCACAUUUC | 66.5 | 58.5 |
| 887 | 3294 | AAAUGUGGUCAGCGAAGCG | 4630 | CGCUUCGCUGACCACAUUU | 64.1 | 56.1 |
| 888 | 3295 | AAUGUGGUCAGCGAAGCGC | 4631 | GCGCUUCGCUGACCACAUU | 54 | 46 |
| 889 | 3296 | AUGUGGUCAGCGAAGCGCU | 4632 | AGCGCUUCGCUGACCACAU | 70.5 | 62.5 |
| 890 | 3297 | UGUGGUCAGCGAAGCGCUU | 4633 | AAGCGCUUCGCUGACCACA | 79.3 | 71.3 |
| 891 | 3298 | GUGGUCAGCGAAGCGCUUA | 4634 | UAAGCGCUUCGCUGACCAC | 82.8 | 74.8 |
| 892 | 3299 | UGGUCAGCGAAGCGCUUAA | 4635 | UUAAGCGCUUCGCUGACCA | 85.5 | 77.5 |
| 893 | 3300 | GGUCAGCGAAGCGCUUAAG | 4636 | CUUAAGCGCUUCGCUGACC | 76.2 | 68.2 |
| 894 | 3301 | GUCAGCGAAGCGCUUAAGG | 4637 | CCUUAAGCGCUUCGCUGAC | 60.7 | 52.7 |
| 895 | 3302 | UCAGCGAAGCGCUUAAGGU | 4638 | ACCUUAAGCGCUUCGCUGA | 66.1 | 58.1 |
| 896 | 3303 | CAGCGAAGCGCUUAAGGUG | 4639 | CACCUUAAGCGCUUCGCUG | 72.5 | 64.5 |
| 897 | 3304 | AGCGAAGCGCUUAAGGUGC | 4640 | GCACCUUAAGCGCUUCGCU | 63.8 | 55.8 |
| 898 | 3305 | GCGAAGCGCUUAAGGUGCC | 4641 | GGCACCUUAAGCGCUUCGC | 65.7 | 57.7 |
| 899 | 3306 | CGAAGCGCUUAAGGUGCCG | 4642 | CGGCACCUUAAGCGCUUCG | 62.7 | 54.7 |
| 900 | 3307 | GAAGCGCUUAAGGUGCCGG | 4643 | CCGGCACCUUAAGCGCUUC | 55 | 46 |
| 901 | 3308 | AAGCGCUUAAGGUGCCGGU | 4644 | ACCGGCACCUUAAGCGCUU | 60.4 | 51.4 |
| 902 | 3309 | AGCGCUUAAGGUGCCGGUG | 4645 | CACCGGCACCUUAAGCGCU | 59.7 | 50.7 |
| 903 | 3310 | GCGCUUAAGGUGCCGGUGU | 4646 | ACACCGGCACCUUAAGCGC | 74.3 | 65.3 |
| 904 | 3311 | CGCUUAAGGUGCCGGUGUC | 4647 | GACACCGGCACCUUAAGCG | 70.1 | 61.1 |
| 905 | 3312 | GCUUAAGGUGCCGGUGUCU | 4648 | AGACACCGGCACCUUAAGC | 75.4 | 66.4 |
| 906 | 3313 | CUUAAGGUGCCGGUGUCUG | 4649 | CAGACACCGGCACCUUAAG | 60.2 | 51.2 |
| 907 | 3314 | UUAAGGUGCCGGUGUCUGA | 4650 | UCAGACACCGGCACCUUAA | 69.5 | 60.5 |
| 908 | 3315 | UAAGGUGCCGGUGUCUGAA | 4651 | UUCAGACACCGGCACCUUA | 71.8 | 62.8 |
| 909 | 3316 | AAGGUGCCGGUGUCUGAAG | 4652 | CUUCAGACACCGGCACCUU | 61.7 | 52.7 |
| 910 | 3317 | AGGUGCCGGUGUCUGAAGG | 4653 | CCUUCAGACACCGGCACCU | 58.5 | 49.5 |
| 911 | 3318 | GGUGCCGGUGUCUGAAGGC | 4654 | GCCUUCAGACACCGGCACC | 58 | 49 |
| 912 | 3319 | GUGCCGGUGUCUGAAGGCU | 4655 | AGCCUUCAGACACCGGCAC | 67.5 | 58.5 |
| 913 | 3320 | UGCCGGUGUCUGAAGGCUG | 4656 | CAGCCUUCAGACACCGGCA | 61.7 | 52.7 |
| 914 | 3321 | GCCGGUGUCUGAAGGCUGC | 4657 | GCAGCCUUCAGACACCGGC | 66.1 | 57.1 |
| 915 | 3322 | CCGGUGUCUGAAGGCUGCA | 4658 | UGCAGCCUUCAGACACCGG | 76.3 | 67.3 |
| 916 | 3323 | CGGUGUCUGAAGGCUGCAG | 4659 | CUGCAGCCUUCAGACACCG | 69.4 | 60.4 |
| 917 | 3324 | GGUGUCUGAAGGCUGCAGC | 4660 | GCUGCAGCCUUCAGACACC | 61.4 | 52.4 |
| 918 | 3325 | GUGUCUGAAGGCUGCAGCC | 4661 | GGCUGCAGCCUUCAGACAC | 58.6 | 49.6 |
| 935 | 3326 | CCAGGCUCUGAUGCGUCUC | 4662 | GAGACGCAUCAGAGCCUGG | 59.8 | 50.8 |
| 936 | 3327 | CAGGCUCUGAUGCGUCUCA | 4663 | UGAGACGCAUCAGAGCCUG | 78.3 | 69.3 |
| 937 | 3328 | AGGCUCUGAUGCGUCUCAU | 4664 | AUGAGACGCAUCAGAGCCU | 73.1 | 64.1 |
| 938 | 3329 | GGCUCUGAUGCGUCUCAUC | 4665 | GAUGAGACGCAUCAGAGCC | 72.1 | 63.1 |
| 939 | 3330 | GCUCUGAUGCGUCUCAUCG | 4666 | CGAUGAGACGCAUCAGAGC | 67.3 | 58.3 |
| 940 | 3331 | CUCUGAUGCGUCUCAUCGG | 4667 | CCGAUGAGACGCAUCAGAG | 61.4 | 52.4 |
| 941 | 3332 | UCUGAUGCGUCUCAUCGGC | 4668 | GCCGAUGAGACGCAUCAGA | 49.6 | 40.6 |
| 942 | 3333 | CUGAUGCGUCUCAUCGGCU | 4669 | AGCCGAUGAGACGCAUCAG | 63.4 | 54.4 |
| 943 | 3334 | UGAUGCGUCUCAUCGGCUG | 4670 | CAGCCGAUGAGACGCAUCA | 61.2 | 52.2 |
| 944 | 3335 | GAUGCGUCUCAUCGGCUGU | 4671 | ACAGCCGAUGAGACGCAUC | 75.6 | 66.6 |
| 945 | 3336 | AUGCGUCUCAUCGGCUGUC | 4672 | GACAGCCGAUGAGACGCAU | 49.5 | 40.5 |
| 946 | 3337 | UGCGUCUCAUCGGCUGUCC | 4673 | GGACAGCCGAUGAGACGCA | 48.5 | 39.5 |
| 947 | 3338 | GCGUCUCAUCGGCUGUCCC | 4674 | GGGACAGCCGAUGAGACGC | 60.6 | 51.6 |
| 981 | 3339 | CCCUCACUUAUGCCCUGCC | 4675 | GGCAGGGCAUAAGUGAGGG | 50.7 | 41.7 |
| 998 | 3340 | CCAGGGCUUCUGCCUCAAC | 4676 | GUUGAGGCAGAAGCCCUGG | 61.8 | 52.8 |
| 999 | 3341 | CAGGGCUUCUGCCUCAACG | 4677 | CGUUGAGGCAGAAGCCCUG | 57.8 | 48.8 |
| 1000 | 3342 | AGGGCUUCUGCCUCAACGU | 4678 | ACGUUGAGGCAGAAGCCCU | 65.7 | 55.7 |
| 1001 | 3343 | GGGCUUCUGCCUCAACGUG | 4679 | CACGUUGAGGCAGAAGCCC | 66.8 | 56.8 |
| 1002 | 3344 | GGCUUCUGCCUCAACGUGG | 4680 | CCACGUUGAGGCAGAAGCC | 64.3 | 54.3 |
| 1003 | 3345 | GCUUCUGCCUCAACGUGGU | 4681 | ACCACGUUGAGGCAGAAGC | 77.4 | 67.4 |
| 1004 | 3346 | CUUCUGCCUCAACGUGGUU | 4682 | AACCACGUUGAGGCAGAAG | 72.3 | 62.3 |
| 1005 | 3347 | UUCUGCCUCAACGUGGUUC | 4683 | GAACCACGUUGAGGCAGAA | 43.5 | 33.5 |
| 1006 | 3348 | UCUGCCUCAACGUGGUUCG | 4684 | CGAACCACGUUGAGGCAGA | 50.9 | 40.9 |
| 1007 | 3349 | CUGCCUCAACGUGGUUCGU | 4685 | ACGAACCACGUUGAGGCAG | 64.3 | 54.3 |
| 1008 | 3350 | UGCCUCAACGUGGUUCGUG | 4686 | CACGAACCACGUUGAGGCA | 48.7 | 38.7 |
| 1009 | 3351 | GCCUCAACGUGGUUCGUGG | 4687 | CCACGAACCACGUUGAGGC | 66.3 | 56.3 |
| 1026 | 3352 | GGCUGUCUCAGCAGCAGGG | 4688 | CCCUGCUGCUGAGACAGCC | 65.7 | 55.7 |
| 1043 | 3353 | GGGACUGGAGCCUGACUGG | 4689 | CCAGUCAGGCUCCAGUCCC | 63.3 | 53.3 |
| 1044 | 3354 | GGACUGGAGCCUGACUGGG | 4690 | CCCAGUCAGGCUCCAGUCC | 57.5 | 47.5 |
| 1061 | 3355 | GGGCAACUAUCUGGAUGGU | 4691 | ACCAUCCAGAUAGUUGCCC | 75.4 | 65.4 |
| 1062 | 3356 | GGCAACUAUCUGGAUGGUC | 4692 | GACCAUCCAGAUAGUUGCC | 65 | 55 |
| 1063 | 3357 | GCAACUAUCUGGAUGGUCU | 4693 | AGACCAUCCAGAUAGUUGC | 83.5 | 73.5 |
| 1064 | 3358 | CAACUAUCUGGAUGGUCUC | 4694 | GAGACCAUCCAGAUAGUUG | 71.7 | 61.7 |
| 1065 | 3359 | AACUAUCUGGAUGGUCUCC | 4695 | GGAGACCAUCCAGAUAGUU | 53.7 | 43.7 |
| 1066 | 3360 | ACUAUCUGGAUGGUCUCCU | 4696 | AGGAGACCAUCCAGAUAGU | 60.9 | 50.9 |
| 1067 | 3361 | CUAUCUGGAUGGUCUCCUG | 4697 | CAGGAGACCAUCCAGAUAG | 71.8 | 61.8 |
| 1068 | 3362 | UAUCUGGAUGGUCUCCUGA | 4698 | UCAGGAGACCAUCCAGAUA | 70.3 | 60.3 |
| 1069 | 3363 | AUCUGGAUGGUCUCCUGAU | 4699 | AUCAGGAGACCAUCCAGAU | 71.8 | 61.8 |
| 1070 | 3364 | UCUGGAUGGUCUCCUGAUC | 4700 | GAUCAGGAGACCAUCCAGA | 61.4 | 51.4 |
| 1071 | 3365 | CUGGAUGGUCUCCUGAUCC | 4701 | GGAUCAGGAGACCAUCCAG | 57.1 | 47.1 |
| 1072 | 3366 | UGGAUGGUCUCCUGAUCCU | 4702 | AGGAUCAGGAGACCAUCCA | 70.7 | 60.7 |
| 1073 | 3367 | GGAUGGUCUCCUGAUCCUG | 4703 | CAGGAUCAGGAGACCAUCC | 74.2 | 64.2 |
| 1074 | 3368 | GAUGGUCUCCUGAUCCUGG | 4704 | CCAGGAUCAGGAGACCAUC | 65.9 | 55.9 |
| 1091 | 3369 | GGCUGAUAAGCUCCAGGGC | 4705 | GCCCUGGAGCUUAUCAGCC | 61.2 | 51.2 |
| 1092 | 3370 | GCUGAUAAGCUCCAGGGCC | 4706 | GGCCCUGGAGCUUAUCAGC | 56.9 | 46.9 |
| 1093 | 3371 | CUGAUAAGCUCCAGGGCCC | 4707 | GGGCCCUGGAGCUUAUCAG | 51.4 | 41.4 |
| 1114 | 3372 | UUUCCUUUGAGCUGACGGC | 4708 | GCCGUCAGCUCAAAGGAAA | 42.5 | 31.5 |
| 1115 | 3373 | UUCCUUUGAGCUGACGGCC | 4709 | GGCCGUCAGCUCAAAGGAA | 37.3 | 26.3 |
| 1116 | 3374 | UCCUUUGAGCUGACGGCCG | 4710 | CGGCCGUCAGCUCAAAGGA | 49.1 | 38.1 |
| 1117 | 3375 | CCUUUGAGCUGACGGCCGA | 4711 | UCGGCCGUCAGCUCAAAGG | 80.5 | 69.5 |
| 1118 | 3376 | CUUUGAGCUGACGGCCGAG | 4712 | CUCGGCCGUCAGCUCAAAG | 58.9 | 47.9 |
| 1119 | 3377 | UUUGAGCUGACGGCCGAGU | 4713 | ACUCGGCCGUCAGCUCAAA | 49.9 | 38.9 |
| 1120 | 3378 | UUGAGCUGACGGCCGAGUC | 4714 | GACUCGGCCGUCAGCUCAA | 47.5 | 36.5 |
| 1121 | 3379 | UGAGCUGACGGCCGAGUCC | 4715 | GGACUCGGCCGUCAGCUCA | 53.5 | 42.5 |
| 1122 | 3380 | GAGCUGACGGCCGAGUCCA | 4716 | UGGACUCGGCCGUCAGCUC | 77 | 66 |
| 1123 | 3381 | AGCUGACGGCCGAGUCCAU | 4717 | AUGGACUCGGCCGUCAGCU | 76.9 | 65.9 |
| 1124 | 3382 | GCUGACGGCCGAGUCCAUU | 4718 | AAUGGACUCGGCCGUCAGC | 71.9 | 60.9 |
| 1125 | 3383 | CUGACGGCCGAGUCCAUUG | 4719 | CAAUGGACUCGGCCGUCAG | 62.8 | 51.8 |
| 1126 | 3384 | UGACGGCCGAGUCCAUUGG | 4720 | CCAAUGGACUCGGCCGUCA | 55.1 | 44.1 |
| 1127 | 3385 | GACGGCCGAGUCCAUUGGG | 4721 | CCCAAUGGACUCGGCCGUC | 54.9 | 43.9 |
| 1144 | 3386 | GGGUGAAGAUCUCGGAGGG | 4722 | CCCUCCGAGAUCUUCACCC | 66.3 | 55.3 |
| 1145 | 3387 | GGUGAAGAUCUCGGAGGGU | 4723 | ACCCUCCGAGAUCUUCACC | 71.7 | 60.7 |
| 1146 | 3388 | GUGAAGAUCUCGGAGGGUU | 4724 | AACCCUCCGAGAUCUUCAC | 74.9 | 63.9 |
| 1147 | 3389 | UGAAGAUCUCGGAGGGUUU | 4725 | AAACCCUCCGAGAUCUUCA | 75.5 | 64.5 |
| 1148 | 3390 | GAAGAUCUCGGAGGGUUUG | 4726 | CAAACCCUCCGAGAUCUUC | 69.2 | 58.2 |
| 1149 | 3391 | AAGAUCUCGGAGGGUUUGA | 4727 | UCAAACCCUCCGAGAUCUU | 68.2 | 57.2 |
| 1150 | 3392 | AGAUCUCGGAGGGUUUGAU | 4728 | AUCAAACCCUCCGAGAUCU | 71.3 | 60.3 |
| 1151 | 3393 | GAUCUCGGAGGGUUUGAUG | 4729 | CAUCAAACCCUCCGAGAUC | 65.5 | 54.5 |
| 1152 | 3394 | AUCUCGGAGGGUUUGAUGU | 4730 | ACAUCAAACCCUCCGAGAU | 63.4 | 52.4 |
| 1153 | 3395 | UCUCGGAGGGUUUGAUGUA | 4731 | UACAUCAAACCCUCCGAGA | 76.8 | 65.8 |
| 1154 | 3396 | CUCGGAGGGUUUGAUGUAC | 4732 | GUACAUCAAACCCUCCGAG | 63.5 | 52.5 |
| 1155 | 3397 | UCGGAGGGUUUGAUGUACC | 4733 | GGUACAUCAAACCCUCCGA | 53.1 | 42.1 |
| 1156 | 3398 | CGGAGGGUUUGAUGUACCU | 4734 | AGGUACAUCAAACCCUCCG | 80.7 | 69.7 |
| 1157 | 3399 | GGAGGGUUUGAUGUACCUG | 4735 | CAGGUACAUCAAACCCUCC | 70.9 | 59.9 |
| 1158 | 3400 | GAGGGUUUGAUGUACCUGC | 4736 | GCAGGUACAUCAAACCCUC | 64.1 | 53.1 |
| 1159 | 3401 | AGGGUUUGAUGUACCUGCA | 4737 | UGCAGGUACAUCAAACCCU | 83.8 | 72.8 |
| 1160 | 3402 | GGGUUUGAUGUACCUGCAG | 4738 | CUGCAGGUACAUCAAACCC | 76.6 | 65.6 |
| 1161 | 3403 | GGUUUGAUGUACCUGCAGG | 4739 | CCUGCAGGUACAUCAAACC | 73.4 | 62.4 |
| 1162 | 3404 | GUUUGAUGUACCUGCAGGA | 4740 | UCCUGCAGGUACAUCAAAC | 82.5 | 71.5 |
| 1163 | 3405 | UUUGAUGUACCUGCAGGAA | 4741 | UUCCUGCAGGUACAUCAAA | 71.2 | 60.2 |
| 1164 | 3406 | UUGAUGUACCUGCAGGAAA | 4742 | UUUCCUGCAGGUACAUCAA | 76.2 | 65.2 |
| 1181 | 3407 | AAACAGUGCGAAGGUGUCC | 4743 | GGACACCUUCGCACUGUUU | 58.4 | 47.4 |
| 1182 | 3408 | AACAGUGCGAAGGUGUCCG | 4744 | CGGACACCUUCGCACUGUU | 56.5 | 45.5 |
| 1183 | 3409 | ACAGUGCGAAGGUGUCCGC | 4745 | GCGGACACCUUCGCACUGU | 58.4 | 47.4 |
| 1184 | 3410 | CAGUGCGAAGGUGUCCGCC | 4746 | GGCGGACACCUUCGCACUG | 53.4 | 42.4 |
| 1185 | 3411 | AGUGCGAAGGUGUCCGCCC | 4747 | GGGCGGACACCUUCGCACU | 57.5 | 46.5 |
| 1186 | 3412 | GUGCGAAGGUGUCCGCCCA | 4748 | UGGGCGGACACCUUCGCAC | 81.4 | 70.4 |
| 1187 | 3413 | UGCGAAGGUGUCCGCCCAG | 4749 | CUGGGCGGACACCUUCGCA | 60.1 | 49.1 |
| 1188 | 3414 | GCGAAGGUGUCCGCCCAGG | 4750 | CCUGGGCGGACACCUUCGC | 61 | 50 |
| 1189 | 3415 | CGAAGGUGUCCGCCCAGGU | 4751 | ACCUGGGCGGACACCUUCG | 72.1 | 61.1 |
| 1190 | 3416 | GAAGGUGUCCGCCCAGGUG | 4752 | CACCUGGGCGGACACCUUC | 66.1 | 55.1 |
| 1191 | 3417 | AAGGUGUCCGCCCAGGUGU | 4753 | ACACCUGGGCGGACACCUU | 63.9 | 52.9 |
| 1192 | 3418 | AGGUGUCCGCCCAGGUGUU | 4754 | AACACCUGGGCGGACACCU | 75.8 | 64.8 |
| 1193 | 3419 | GGUGUCCGCCCAGGUGUUU | 4755 | AAACACCUGGGCGGACACC | 74.8 | 63.8 |
| 1194 | 3420 | GUGUCCGCCCAGGUGUUUC | 4756 | GAAACACCUGGGCGGACAC | 56.9 | 45.9 |
| 1195 | 3421 | UGUCCGCCCAGGUGUUUCA | 4757 | UGAAACACCUGGGCGGACA | 73.1 | 62.1 |
| 1196 | 3422 | GUCCGCCCAGGUGUUUCAG | 4758 | CUGAAACACCUGGGCGGAC | 58.2 | 47.2 |
| 1197 | 3423 | UCCGCCCAGGUGUUUCAGG | 4759 | CCUGAAACACCUGGGCGGA | 43.4 | 32.4 |
| 1198 | 3424 | CCGCCCAGGUGUUUCAGGA | 4760 | UCCUGAAACACCUGGGCGG | 73.3 | 62.3 |
| 1199 | 3425 | CGCCCAGGUGUUUCAGGAG | 4761 | CUCCUGAAACACCUGGGCG | 67.1 | 56.1 |
| 1200 | 3426 | GCCCAGGUGUUUCAGGAGU | 4762 | ACUCCUGAAACACCUGGGC | 76.4 | 64.4 |
| 1201 | 3427 | CCCAGGUGUUUCAGGAGUG | 4763 | CACUCCUGAAACACCUGGG | 72 | 60 |
| 1202 | 3428 | CCAGGUGUUUCAGGAGUGC | 4764 | GCACUCCUGAAACACCUGG | 64.8 | 52.8 |
| 1203 | 3429 | CAGGUGUUUCAGGAGUGCG | 4765 | CGCACUCCUGAAACACCUG | 64 | 52 |
| 1204 | 3430 | AGGUGUUUCAGGAGUGCGG | 4766 | CCGCACUCCUGAAACACCU | 66.4 | 54.4 |
| 1205 | 3431 | GGUGUUUCAGGAGUGCGGC | 4767 | GCCGCACUCCUGAAACACC | 62.1 | 50.1 |
| 1206 | 3432 | GUGUUUCAGGAGUGCGGCC | 4768 | GGCCGCACUCCUGAAACAC | 56.9 | 44.9 |
| 1207 | 3433 | UGUUUCAGGAGUGCGGCCC | 4769 | GGGCCGCACUCCUGAAACA | 44 | 32 |
| 1227 | 3434 | CCCGACCCGGUGCCUGCCC | 4770 | GGGCAGGCACCGGGUCGGG | 45.8 | 33.8 |
| 1228 | 3435 | CCGACCCGGUGCCUGCCCG | 4771 | CGGGCAGGCACCGGGUCGG | 51.8 | 39.8 |
| 1229 | 3436 | CGACCCGGUGCCUGCCCGC | 4772 | GCGGGCAGGCACCGGGUCG | 50.8 | 38.8 |
| 1230 | 3437 | GACCCGGUGCCUGCCCGCA | 4773 | UGCGGGCAGGCACCGGGUC | 65.8 | 53.8 |
| 1231 | 3438 | ACCCGGUGCCUGCCCGCAA | 4774 | UUGCGGGCAGGCACCGGGU | 72.6 | 60.6 |
| 1232 | 3439 | CCCGGUGCCUGCCCGCAAC | 4775 | GUUGCGGGCAGGCACCGGG | 59.7 | 47.7 |
| 1233 | 3440 | CCGGUGCCUGCCCGCAACC | 4776 | GGUUGCGGGCAGGCACCGG | 49.5 | 37.5 |
| 1234 | 3441 | CGGUGCCUGCCCGCAACCG | 4777 | CGGUUGCGGGCAGGCACCG | 51.8 | 39.8 |
| 1235 | 3442 | GGUGCCUGCCCGCAACCGU | 4778 | ACGGUUGCGGGCAGGCACC | 65.8 | 53.8 |
| 1236 | 3443 | GUGCCUGCCCGCAACCGUC | 4779 | GACGGUUGCGGGCAGGCAC | 55.5 | 43.5 |
| 1237 | 3444 | UGCCUGCCCGCAACCGUCG | 4780 | CGACGGUUGCGGGCAGGCA | 45.8 | 33.8 |
| 1238 | 3445 | GCCUGCCCGCAACCGUCGA | 4781 | UCGACGGUUGCGGGCAGGC | 72.1 | 60.1 |
| 1239 | 3446 | CCUGCCCGCAACCGUCGAG | 4782 | CUCGACGGUUGCGGGCAGG | 54.6 | 42.6 |
| 1240 | 3447 | CUGCCCGCAACCGUCGAGC | 4783 | GCUCGACGGUUGCGGGCAG | 39.2 | 27.2 |
| 1241 | 3448 | UGCCCGCAACCGUCGAGCC | 4784 | GGCUCGACGGUUGCGGGCA | 43.2 | 31.2 |
| 1242 | 3449 | GCCCGCAACCGUCGAGCCC | 4785 | GGGCUCGACGGUUGCGGGC | 50.8 | 38.8 |
| 1267 | 3450 | CCCGGGAAGAGGCGGGCCG | 4786 | CGGCCCGCCUCUUCCCGGG | 48.2 | 36.2 |
| 1268 | 3451 | CCGGGAAGAGGCGGGCCGG | 4787 | CCGGCCCGCCUCUUCCCGG | 47.9 | 35.9 |
| 1269 | 3452 | CGGGAAGAGGCGGGCCGGC | 4788 | GCCGGCCCGCCUCUUCCCG | 43.6 | 31.6 |
| 1270 | 3453 | GGGAAGAGGCGGGCCGGCU | 4789 | AGCCGGCCCGCCUCUUCCC | 60.7 | 48.7 |
| 1271 | 3454 | GGAAGAGGCGGGCCGGCUG | 4790 | CAGCCGGCCCGCCUCUUCC | 63.9 | 51.9 |
| 1272 | 3455 | GAAGAGGCGGGCCGGCUGU | 4791 | ACAGCCGGCCCGCCUCUUC | 66.7 | 54.7 |
| 1273 | 3456 | AAGAGGCGGGCCGGCUGUG | 4792 | CACAGCCGGCCCGCCUCUU | 48.5 | 36.5 |
| 1274 | 3457 | AGAGGCGGGCCGGCUGUGG | 4793 | CCACAGCCGGCCCGCCUCU | 46 | 34 |
| 1275 | 3458 | GAGGCGGGCCGGCUGUGGU | 4794 | ACCACAGCCGGCCCGCCUC | 61.8 | 49.8 |
| 1276 | 3459 | AGGCGGGCCGGCUGUGGUC | 4795 | GACCACAGCCGGCCCGCCU | 53.6 | 41.6 |
| 1277 | 3460 | GGCGGGCCGGCUGUGGUCG | 4796 | CGACCACAGCCGGCCCGCC | 53.1 | 41.1 |
| 1278 | 3461 | GCGGGCCGGCUGUGGUCGA | 4797 | UCGACCACAGCCGGCCCGC | 74.2 | 62.2 |
| 1279 | 3462 | CGGGCCGGCUGUGGUCGAU | 4798 | AUCGACCACAGCCGGCCCG | 70.7 | 58.7 |
| 1280 | 3463 | GGGCCGGCUGUGGUCGAUG | 4799 | CAUCGACCACAGCCGGCCC | 52.7 | 50.7 |
| 1281 | 3464 | GGCCGGCUGUGGUCGAUGG | 4800 | CCAUCGACCACAGCCGGCC | 69.7 | 57.7 |
| 1282 | 3465 | GCCGGCUGUGGUCGAUGGU | 4801 | ACCAUCGACCACAGCCGGC | 72 | 60 |
| 1283 | 3466 | CCGGCUGUGGUCGAUGGUG | 4802 | CACCAUCGACCACAGCCGG | 64.9 | 52.9 |
| 1284 | 3467 | CGGCUGUGGUCGAUGGUGA | 4803 | UCACCAUCGACCACAGCCG | 88.4 | 76.4 |
| 1285 | 3468 | GGCUGUGGUCGAUGGUGAC | 4804 | GUCACCAUCGACCACAGCC | 78.1 | 66.1 |
| 1286 | 3469 | GCUGUGGUCGAUGGUGACC | 4805 | GGUCACCAUCGACCACAGC | 63.9 | 51.9 |
| 1287 | 3470 | CUGUGGUCGAUGGUGACCG | 4806 | CGGUCACCAUCGACCACAG | 58 | 46 |
| 1288 | 3471 | UGUGGUCGAUGGUGACCGA | 4807 | UCGGUCACCAUCGACCACA | 84.6 | 72.6 |
| 1289 | 3472 | GUGGUCGAUGGUGACCGAG | 4808 | CUCGGUCACCAUCGACCAC | 64.7 | 52.7 |
| 1290 | 3473 | UGGUCGAUGGUGACCGAGG | 4809 | CCUCGGUCACCAUCGACCA | 60.6 | 48.6 |
| 1291 | 3474 | GGUCGAUGGUGACCGAGGA | 4810 | UCCUCGGUCACCAUCGACC | 92.2 | 80.2 |
| 1292 | 3475 | GUCGAUGGUGACCGAGGAG | 4811 | CUCCUCGGUCACCAUCGAC | 69.3 | 57.3 |
| 1293 | 3476 | UCGAUGGUGACCGAGGAGG | 4812 | CCUCCUCGGUCACCAUCGA | 49.8 | 37.8 |
| 1294 | 3477 | CGAUGGUGACCGAGGAGGA | 4813 | UCCUCCUCGGUCACCAUCG | 88.4 | 76.4 |
| 1295 | 3478 | GAUGGUGACCGAGGAGGAG | 4814 | CUCCUCCUCGGUCACCAUC | 69 | 57 |
| 1296 | 3479 | AUGGUGACCGAGGAGGAGC | 4815 | GCUCCUCCUCGGUCACCAU | 46.7 | 34.7 |
| 1297 | 3480 | UGGUGACCGAGGAGGAGCG | 4816 | CGCUCCUCCUCGGUCACCA | 55.8 | 43.8 |
| 1298 | 3481 | GGUGACCGAGGAGGAGCGG | 4817 | CCGCUCCUCCUCGGUCACC | 60.9 | 48.9 |
| 1299 | 3482 | GUGACCGAGGAGGAGCGGC | 4818 | GCCGCUCCUCCUCGGUCAC | 47.3 | 35.3 |
| 1300 | 3483 | UGACCGAGGAGGAGCGGCC | 4819 | GGCCGCUCCUCCUCGGUCA | 46.7 | 33.7 |
| 1301 | 3484 | GACCGAGGAGGAGCGGCCC | 4820 | GGGCCGCUCCUCCUCGGUC | 53.4 | 40.4 |
| 1302 | 3485 | ACCGAGGAGGAGCGGCCCA | 4821 | UGGGCCGCUCCUCCUCGGU | 67.1 | 54.1 |
| 1303 | 3486 | CCGAGGAGGAGCGGCCCAC | 4822 | GUGGGCCGCUCCUCCUCGG | 55.3 | 42.3 |
| 1304 | 3487 | CGAGGAGGAGCGGCCCACG | 4823 | CGUGGGCCGCUCCUCCUCG | 57.6 | 44.6 |
| 1305 | 3488 | GAGGAGGAGCGGCCCACGA | 4824 | UCGUGGGCCGCUCCUCCUC | 76.3 | 63.3 |
| 1306 | 3489 | AGGAGGAGCGGCCCACGAC | 4825 | GUCGUGGGCCGCUCCUCCU | 59 | 46 |
| 1307 | 3490 | GGAGGAGCGGCCCACGACG | 4826 | CGUCGUGGGCCGCUCCUCC | 64.5 | 51.5 |
| 1308 | 3491 | GAGGAGCGGCCCACGACGG | 4827 | CCGUCGUGGGCCGCUCCUC | 59.4 | 46.4 |
| 1309 | 3492 | AGGAGCGGCCCACGACGGC | 4828 | GCCGUCGUGGGCCGCUCCU | 47.1 | 34.1 |
| 1310 | 3493 | GGAGCGGCCCACGACGGCC | 4829 | GGCCGUCGUGGGCCGCUCC | 52.1 | 39.1 |
| 1311 | 3494 | GAGCGGCCCACGACGGCCG | 4830 | CGGCCGUCGUGGGCCGCUC | 54.8 | 41.8 |
| 1312 | 3495 | AGCGGCCCACGACGGCCGC | 4831 | GCGGCCGUCGUGGGCCGCU | 45 | 32 |
| 1313 | 3496 | GCGGCCCACGACGGCCGCA | 4832 | UGCGGCCGUCGUGGGCCGC | 63.7 | 50.7 |
| 1314 | 3497 | CGGCCCACGACGGCCGCAG | 4833 | CUGCGGCCGUCGUGGGCCG | 53.2 | 40.2 |
| 1315 | 3498 | GGCCCACGACGGCCGCAGG | 4834 | CCUGCGGCCGUCGUGGGCC | 58 | 45 |
| 1316 | 3499 | GCCCACGACGGCCGCAGGC | 4835 | GCCUGCGGCCGUCGUGGGC | 47.6 | 34.6 |
| 1317 | 3500 | CCCACGACGGCCGCAGGCA | 4836 | UGCCUGCGGCCGUCGUGGG | 66.5 | 53.5 |
| 1318 | 3501 | CCACGACGGCCGCAGGCAC | 4837 | GUGCCUGCGGCCGUCGUGG | 61.6 | 48.6 |
| 1319 | 3502 | CACGACGGCCGCAGGCACC | 4838 | GGUGCCUGCGGCCGUCGUG | 52.3 | 39.3 |
| 1320 | 3503 | ACGACGGCCGCAGGCACCA | 4839 | UGGUGCCUGCGGCCGUCGU | 65 | 52 |
| 1321 | 3504 | CGACGGCCGCAGGCACCAA | 4840 | UUGGUGCCUGCGGCCGUCG | 82.7 | 69.7 |
| 1322 | 3505 | GACGGCCGCAGGCACCAAC | 4841 | GUUGGUGCCUGCGGCCGUC | 57 | 44 |
| 1323 | 3506 | ACGGCCGCAGGCACCAACC | 4842 | GGUUGGUGCCUGCGGCCGU | 45.2 | 32.2 |
| 1324 | 3507 | CGGCCGCAGGCACCAACCU | 4843 | AGGUUGGUGCCUGCGGCCG | 66.8 | 53.8 |
| 1325 | 3508 | GGCCGCAGGCACCAACCUG | 4844 | CAGGUUGGUGCCUGCGGCC | 63.5 | 50.5 |
| 1326 | 3509 | GCCGCAGGCACCAACCUGC | 4845 | GCAGGUUGGUGCCUGCGGC | 56.5 | 43.5 |
| 1327 | 3510 | CCGCAGGCACCAACCUGCA | 4846 | UGCAGGUUGGUGCCUGCGG | 77.1 | 64.1 |
| 1328 | 3511 | CGCAGGCACCAACCUGCAC | 4847 | GUGCAGGUUGGUGCCUGCG | 65.9 | 52.9 |
| 1329 | 3512 | GCAGGCACCAACCUGCACC | 4848 | GGUGCAGGUUGGUGCCUGC | 55.6 | 42.6 |
| 1330 | 3513 | CAGGCACCAACCUGCACCG | 4849 | CGGUGCAGGUUGGUGCCUG | 58.3 | 45.3 |
| 1331 | 3514 | AGGCACCAACCUGCACCGG | 4850 | CCGGUGCAGGUUGGUGCCU | 50.4 | 37.4 |
| 1332 | 3515 | GGCACCAACCUGCACCGGC | 4851 | GCCGGUGCAGGUUGGUGCC | 54.5 | 41.5 |
| 1333 | 3516 | GCACCAACCUGCACCGGCU | 4852 | AGCCGGUGCAGGUUGGUGC | 75.5 | 62.5 |
| 1334 | 3517 | CACCAACCUGCACCGGCUG | 4853 | CAGCCGGUGCAGGUUGGUG | 63.2 | 50.2 |
| 1335 | 3518 | ACCAACCUGCACCGGCUGG | 4854 | CCAGCCGGUGCAGGUUGGU | 50.1 | 37.1 |
| 1336 | 3519 | CCAACCUGCACCGGCUGGU | 4855 | ACCAGCCGGUGCAGGUUGG | 59.4 | 46.4 |
| 1337 | 3520 | CAACCUGCACCGGCUGGUG | 4856 | CACCAGCCGGUGCAGGUUG | 60.6 | 47.6 |
| 1338 | 3521 | AACCUGCACCGGCUGGUGU | 4857 | ACACCAGCCGGUGCAGGUU | 62.4 | 49.4 |
| 1339 | 3522 | ACCUGCACCGGCUGGUGUG | 4858 | CACACCAGCCGGUGCAGGU | 60.1 | 47.1 |
| 1340 | 3523 | CCUGCACCGGCUGGUGUGG | 4859 | CCACACCAGCCGGUGCAGG | 57.3 | 44.3 |
| 1341 | 3524 | CUGCACCGGCUGGUGUGGG | 4860 | CCCACACCAGCCGGUGCAG | 44.7 | 31.7 |
| 1342 | 3525 | UGCACCGGCUGGUGUGGGA | 4861 | UCCCACACCAGCCGGUGCA | 67 | 54 |
| 1343 | 3526 | GCACCGGCUGGUGUGGGAG | 4862 | CUCCCACACCAGCCGGUGC | 61.3 | 48.3 |
| 1344 | 3527 | CACCGGCUGGUGUGGGAGC | 4863 | GCUCCCACACCAGCCGGUG | 54.1 | 41.1 |
| 1345 | 3528 | ACCGGCUGGUGUGGGAGCU | 4864 | AGCUCCCACACCAGCCGGU | 59.3 | 46.3 |
| 1346 | 3529 | CCGGCUGGUGUGGGAGCUC | 4865 | GAGCUCCCACACCAGCCGG | 58 | 45 |
| 1347 | 3530 | CGGCUGGUGUGGGAGCUCC | 4866 | GGAGCUCCCACACCAGCCG | 60.9 | 47.9 |
| 1348 | 3531 | GGCUGGUGUGGGAGCUCCG | 4867 | CGGAGCUCCCACACCAGCC | 69.2 | 56.2 |
| 1349 | 3532 | GCUGGUGUGGGAGCUCCGC | 4868 | GOGGAGCUCCCACACCAGC | 57.5 | 44.5 |
| 1350 | 3533 | CUGGUGUGGGAGCUCCGCG | 4869 | CGCGGAGCUCCCACACCAG | 51.8 | 38.8 |
| 1351 | 3534 | UGGUGUGGGAGCUCCGCGA | 4870 | UCGCGGAGCUCCCACACCA | 73.2 | 60.2 |
| 1352 | 3535 | GGUGUGGGAGCUCCGCGAG | 4871 | CUCGCGGAGCUCCCACACC | 70.5 | 57.5 |
| 1353 | 3536 | GUGUGGGAGCUCCGCGAGC | 4872 | GCUCGCGGAGCUCCCACAC | 57.9 | 44.9 |
| 1354 | 3537 | UGUGGGAGCUCCGCGAGCG | 4873 | CGCUCGCGGAGCUCCCACA | 52.9 | 39.9 |
| 1355 | 3538 | GUGGGAGCUCCGCGAGCGU | 4874 | ACGCUCGCGGAGCUCCCAC | 67.6 | 54.6 |
| 1356 | 3539 | UGGGAGCUCCGCGAGCGUC | 4875 | GACGCUCGCGGAGCUCCCA | 50.5 | 37.5 |
| 1357 | 3540 | GGGAGCUCCGCGAGCGUCU | 4876 | AGACGCUCGCGGAGCUCCC | 73 | 60 |
| 1358 | 3541 | GGAGCUCCGCGAGCGUCUG | 4877 | CAGACGCUCGCGGAGCUCC | 69.9 | 56.9 |
| 1359 | 3542 | GAGCUCCGCGAGCGUCUGG | 4878 | CCAGACGCUCGCGGAGCUC | 58.9 | 45.9 |
| 1388 | 3543 | GGGCUUCUGGGCCCGGCUG | 4879 | CAGCCGGGCCCAGAAGCCC | 58.5 | 45.5 |
| 1389 | 3544 | GGCUUCUGGGCCCGGCUGU | 4880 | ACAGCCGGGCCCAGAAGCC | 65.1 | 52.1 |
| 1390 | 3545 | GCUUCUGGGCCCGGCUGUC | 4881 | GACAGCCGGGCCCAGAAGC | 57 | 44 |
| 1391 | 3546 | CUUCUGGGCCCGGCUGUCC | 4882 | GGACAGCCGGGCCCAGAAG | 44.4 | 31.4 |
| 1392 | 3547 | UUCUGGGCCCGGCUGUCCC | 4883 | GGGACAGCCGGGCCCAGAA | 36.5 | 23.5 |
| 1393 | 3548 | UCUGGGCCCGGCUGUCCCU | 4884 | AGGGACAGCCGGGCCCAGA | 53.2 | 40.2 |
| 1394 | 3549 | CUGGGCCCGGCUGUCCCUG | 4885 | CAGGGACAGCCGGGCCCAG | 43.5 | 30.5 |
| 1395 | 3550 | UGGGCCCGGCUGUCCCUGA | 4886 | UCAGGGACAGCCGGGCCCA | 59 | 46 |
| 1396 | 3551 | GGGCCCGGCUGUCCCUGAC | 4887 | GUCAGGGACAGCCGGGCCC | 59.4 | 46.4 |
| 1397 | 3552 | GGCCCGGCUGUCCCUGACG | 4888 | CGUCAGGGACAGCCGGGCC | 58.9 | 45.9 |
| 1398 | 3553 | GCCCGGCUGUCCCUGACGG | 4889 | CCGUCAGGGACAGCCGGGC | 58.6 | 45.6 |
| 1399 | 3554 | CCCGGCUGUCCCUGACGGU | 4890 | ACCGUCAGGGACAGCCGGG | 64.7 | 51.7 |
| 1400 | 3555 | CCGGCUGUCCCUGACGGUG | 4891 | CACCGUCAGGGACAGCCGG | 60.9 | 46.9 |
| 1401 | 3556 | CGGCUGUCCCUGACGGUGU | 4892 | ACACCGUCAGGGACAGCCG | 76.4 | 62.4 |
| 1402 | 3557 | GGCUGUCCCUGACGGUGUG | 4893 | CACACCGUCAGGGACAGCC | 76.7 | 62.7 |
| 1403 | 3558 | GCUGUCCCUGACGGUGUGC | 4894 | GCACACCGUCAGGGACAGC | 57.6 | 43.6 |
| 1404 | 3559 | CUGUCCCUGACGGUGUGCG | 4895 | CGCACACCGUCAGGGACAG | 49.9 | 35.9 |
| 1405 | 3560 | UGUCCCUGACGGUGUGCGG | 4896 | CCGCACACCGUCAGGGACA | 56.2 | 42.2 |
| 1406 | 3561 | GUCCCUGACGGUGUGCGGA | 4897 | UCCGCACACCGUCAGGGAC | 72.1 | 58.1 |
| 1407 | 3562 | UCCCUGACGGUGUGCGGAG | 4898 | CUCCGCACACCGUCAGGGA | 56.2 | 42.2 |
| 1408 | 3563 | CCCUGACGGUGUGCGGAGA | 4899 | UCUCCGCACACCGUCAGGG | 80.8 | 66.8 |
| 1409 | 3564 | CCUGACGGUGUGCGGAGAC | 4900 | GUCUCCGCACACCGUCAGG | 63.8 | 49.8 |
| 1410 | 3565 | CUGACGGUGUGCGGAGACU | 4901 | AGUCUCCGCACACCGUCAG | 71.5 | 57.8 |
| 1411 | 3566 | UGACGGUGUGCGGAGACUC | 4902 | GAGUCUCCGCACACCGUCA | 61.6 | 47.6 |
| 1412 | 3567 | GACGGUGUGCGGAGACUCU | 4903 | AGAGUCUCCGCACACCGUC | 83.1 | 69.1 |
| 1413 | 3568 | ACGGUGUGCGGAGACUCUC | 4904 | GAGAGUCUCCGCACACCGU | 63.3 | 49.3 |
| 1414 | 3569 | CGGUGUGCGGAGACUCUCG | 4905 | CGAGAGUCUCCGCACACCG | 72.6 | 58.6 |
| 1415 | 3570 | GGUGUGCGGAGACUCUCGC | 4906 | GCGAGAGUCUCCGCACACC | 63.9 | 49.9 |
| 1416 | 3571 | GUGUGCGGAGACUCUCGCA | 4907 | UGCGAGAGUCUCCGCACAC | 78.1 | 64.1 |
| 1417 | 3572 | UGUGCGGAGACUCUCGCAU | 4908 | AUGCGAGAGUCUCCGCACA | 70.1 | 56.1 |
| 1418 | 3573 | GUGCGGAGACUCUCGCAUG | 4909 | CAUGCGAGAGUCUCCGCAC | 69.2 | 55.2 |
| 1419 | 3574 | UGCGGAGACUCUCGCAUGG | 4910 | CCAUGCGAGAGUCUCCGCA | 59.3 | 45.3 |
| 1436 | 3575 | GGCAGCGGACGCCUCGCUG | 4911 | CAGCGAGGCGUCCGCUGCC | 62.1 | 48.1 |
| 1437 | 3576 | GCAGCGGACGCCUCGCUGG | 4912 | CCAGCGAGGCGUCCGCUGC | 60.3 | 46.3 |
| 1438 | 3577 | CAGCGGACGCCUCGCUGGA | 4913 | UCCAGCGAGGCGUCCGCUG | 72.9 | 58.9 |
| 1439 | 3578 | AGCGGACGCCUCGCUGGAG | 4914 | CUCCAGCGAGGCGUCCGCU | 54.6 | 40.6 |
| 1440 | 3579 | GCGGACGCCUCGCUGGAGG | 4915 | CCUCCAGCGAGGCGUCCGC | 54.5 | 40.5 |
| 1441 | 3580 | CGGACGCCUCGCUGGAGGC | 4916 | GCCUCCAGCGAGGCGUCCG | 51.8 | 37.8 |
| 1442 | 3581 | GGACGCCUCGCUGGAGGCG | 4917 | CGCCUCCAGCGAGGCGUCC | 51 | 37 |
| 1443 | 3582 | GACGCCUCGCUGGAGGCGG | 4918 | CCGCCUCCAGCGAGGCGUC | 48 | 34 |
| 1444 | 3583 | ACGCCUCGCUGGAGGCGGC | 4919 | GCCGCCUCCAGCGAGGCGU | 45 | 31 |
| 1445 | 3584 | CGCCUCGCUGGAGGCGGCG | 4920 | CGCCGCCUCCAGCGAGGCG | 45.6 | 31.6 |
| 1446 | 3585 | GCCUCGCUGGAGGCGGCGC | 4921 | GCGCCGCCUCCAGCGAGGC | 46.8 | 32.8 |
| 1447 | 3586 | CCUCGCUGGAGGCGGCGCC | 4922 | GGCGCCGCCUCCAGCGAGG | 43.7 | 29.7 |
| 1448 | 3587 | CUCGCUGGAGGCGGCGCCC | 4923 | GGGCGCCGCCUCCAGCGAG | 40.3 | 26.3 |
| 1449 | 3588 | UCGCUGGAGGCGGCGCCCU | 4924 | AGGGCGCCGCCUCCAGCGA | 46.4 | 32.4 |
| 1450 | 3589 | CGCUGGAGGCGGCGCCCUG | 4925 | CAGGGCGCCGCCUCCAGCG | 61.1 | 47.1 |
| 1451 | 3590 | GCUGGAGGCGGCGCCCUGC | 4926 | GCAGGGCGCCGCCUCCAGC | 51.4 | 37.4 |
| 1452 | 3591 | CUGGAGGCGGCGCCCUGCU | 4927 | AGCAGGGCGCCGCCUCCAG | 57.2 | 43.2 |
| 1453 | 3592 | UGGAGGCGGCGCCCUGCUG | 4928 | CAGCAGGGCGCCGCCUCCA | 51.8 | 37.8 |
| 1454 | 3593 | GGAGGCGGCGCCCUGCUGG | 4929 | CCAGCAGGGCGCCGCCUCC | 53.9 | 39.9 |
| 1455 | 3594 | GAGGCGGCGCCCUGCUGGA | 4930 | UCCAGCAGGGCGCCGCCUC | 70.9 | 56.9 |
| 1456 | 3595 | AGGCGGCGCCCUGCUGGAC | 4931 | GUCCAGCAGGGCGCCGCCU | 50.3 | 36.3 |
| 1457 | 3596 | GGCGGCGCCCUGCUGGACC | 4932 | GGUCCAGCAGGGCGCCGCC | 51 | 37 |
| 1458 | 3597 | GCGGCGCCCUGCUGGACCG | 4933 | CGGUCCAGCAGGGCGCCGC | 60.4 | 46.4 |
| 1459 | 3598 | CGGCGCCCUGCUGGACCGG | 4934 | CCGGUCCAGCAGGGCGCCG | 49.7 | 35.7 |
| 1460 | 3599 | GGCGCCCUGCUGGACCGGA | 4935 | UCCGGUCCAGCAGGGCGCC | 67.2 | 53.2 |
| 1461 | 3600 | GCGCCCUGCUGGACCGGAG | 4936 | CUCCGGUCCAGCAGGGCGC | 63.8 | 49.8 |
| 1462 | 3601 | CGCCCUGCUGGACCGGAGC | 4937 | GCUCCGGUCCAGCAGGGCG | 55.2 | 41.2 |
| 1463 | 3602 | GCCCUGCUGGACCGGAGCC | 4938 | GGCUCCGGUCCAGCAGGGC | 51.1 | 37.1 |
| 1464 | 3603 | CCCUGCUGGACCGGAGCCG | 4939 | CGGCUCCGGUCCAGCAGGG | 49.5 | 35.5 |
| 1465 | 3604 | CCUGCUGGACCGGAGCCGG | 4940 | CCGGCUCCGGUCCAGCAGG | 54.3 | 40.3 |
| 1466 | 3605 | CUGCUGGACCGGAGCCGGG | 4941 | CCCGGCUCCGGUCCAGCAG | 50 | 36 |
| 1467 | 3606 | UGCUGGACCGGAGCCGGGC | 4942 | GCCCGGCUCCGGUCCAGCA | 40.2 | 26.2 |
| 1468 | 3607 | GCUGGACCGGAGCCGGGCG | 4943 | CGCCCGGCUCCGGUCCAGC | 54.4 | 40.4 |
| 1469 | 3608 | CUGGACCGGAGCCGGGCGG | 4944 | CCGCCCGGCUCCGGUCCAG | 42.5 | 28.5 |
| 1470 | 3609 | UGGACCGGAGCCGGGCGGG | 4945 | CCCGCCCGGCUCCGGUCCA | 33.5 | 19.5 |
| 1520 | 3610 | CCCGGCCGAGCAGGUCAAC | 4946 | GUUGACCUGCUCGGCCGGG | 55.8 | 40.8 |
| 1521 | 3611 | CCGGCCGAGCAGGUCAACA | 4947 | UGUUGACCUGCUCGGCCGG | 70.4 | 55.4 |
| 1522 | 3612 | CGGCCGAGCAGGUCAACAA | 4948 | UUGUUGACCUGCUCGGCCG | 90.5 | 75.5 |
| 1523 | 3613 | GGCCGAGCAGGUCAACAAC | 4949 | GUUGUUGACCUGCUCGGCC | 74.6 | 59.6 |
| 1524 | 3614 | GCCGAGCAGGUCAACAACC | 4950 | GGUUGUUGACCUGCUCGGC | 64.6 | 49.6 |
| 1525 | 3615 | CCGAGCAGGUCAACAACCC | 4951 | GGGUUGUUGACCUGCUCGG | 63.2 | 48.2 |
| 1542 | 3616 | CCCGAGCUCAAGGUGGACG | 4952 | CGUCCACCUUGAGCUCGGG | 58.3 | 43.3 |
| 1543 | 3617 | CCGAGCUCAAGGUGGACGC | 4953 | GCGUCCACCUUGAGCUCGG | 59.7 | 44.7 |
| 1544 | 3618 | CGAGCUCAAGGUGGACGCC | 4954 | GGCGUCCACCUUGAGCUCG | 59.8 | 44.8 |
| 1545 | 3619 | GAGCUCAAGGUGGACGCCU | 4955 | AGGCGUCCACCUUGAGCUC | 66 | 51 |
| 1546 | 3620 | AGCUCAAGGUGGACGCCUC | 4956 | GAGGCGUCCACCUUGAGCU | 67.3 | 52.3 |
| 1547 | 3621 | GCUCAAGGUGGACGCCUCG | 4957 | CGAGGCGUCCACCUUGAGC | 66.4 | 51.4 |
| 1548 | 3622 | CUCAAGGUGGACGCCUCGG | 4958 | CCGAGGCGUCCACCUUGAG | 51.9 | 36.9 |
| 1549 | 3623 | UCAAGGUGGACGCCUCGGG | 4959 | CCCGAGGCGUCCACCUUGA | 44.5 | 29.5 |
| 1550 | 3624 | CAAGGUGGACGCCUCGGGC | 4960 | GCCCGAGGCGUCCACCUUG | 50.3 | 35.3 |
| 1551 | 3625 | AAGGUGGACGCCUCGGGCC | 4961 | GGCCCGAGGCGUCCACCUU | 39.8 | 24.8 |
| 1552 | 3626 | AGGUGGACGCCUCGGGCCC | 4962 | GGGCCCGAGGCGUCCACCU | 45.5 | 30.5 |
| 1569 | 3627 | CCCGAUGUCCCGACACGGC | 4963 | GCCGUGUCGGGACAUCGGG | 61.1 | 46.1 |
| 1570 | 3628 | CCGAUGUCCCGACACGGCG | 4964 | CGCCGUGUCGGGACAUCGG | 65.6 | 50.6 |
| 1571 | 3629 | CGAUGUCCCGACACGGCGG | 4965 | CCGCCGUGUCGGGACAUCG | 70.7 | 55.7 |
| 1572 | 3630 | GAUGUCCCGACACGGCGGC | 4966 | GCCGCCGUGUCGGGACAUC | 53.3 | 38.3 |
| 1573 | 3831 | AUGUCCCGACACGGCGGCG | 4987 | CGCCGCCGUGUCGGGACAU | 44.7 | 29.7 |
| 1574 | 3632 | UGUCCCGACACGGCGGCGU | 4968 | ACGCCGCCGUGUCGGGACA | 54.4 | 39.4 |
| 1575 | 3833 | GUCCCGACACGGCGGCGUC | 4969 | GACGCCGCCGUGUCGGGAC | 59.9 | 44.9 |
| 1576 | 3634 | UCCCGACACGGCGGCGUCG | 4970 | CGACGCCGCCGUGUCGGGA | 47.2 | 32.2 |
| 1577 | 3635 | CCCGACACGGCGGCGUCGG | 4971 | CCGACGCCGCCGUGUCGGG | 50.6 | 35.6 |
| 1578 | 3636 | CCGACACGGCGGCGUCGGC | 4972 | GCCGACGCCGCCGUGUCGG | 52.6 | 37.6 |
| 1579 | 3637 | CGACACGGCGGCGUCGGCU | 4973 | AGCCGACGCCGCCGUGUCG | 62.6 | 47.6 |
| 1580 | 3638 | GACACGGCGGCGUCGGCUA | 4974 | UAGCCGACGCCGCCGUGUC | 81.9 | 66.9 |
| 1581 | 3639 | ACACGGCGGCGUCGGCUAC | 4975 | GUAGCCGACGCCGCCGUGU | 59.6 | 44.6 |
| 1582 | 3640 | CACGGCGGCGUCGGCUACA | 4976 | UGUAGCCGACGCCGCCGUG | 69.5 | 54.5 |
| 1583 | 3641 | ACGGCGGCGUCGGCUACAG | 4977 | CUGUAGCCGACGCCGCCGU | 58.7 | 43.7 |
| 1584 | 3642 | CGGCGGCGUCGGCUACAGC | 4978 | GCUGUAGCCGACGCCGCCG | 59 | 44 |
| 1585 | 3643 | GGCGGCGUCGGCUACAGCU | 4979 | AGCUGUAGCCGACGCCGCC | 72.2 | 57.2 |
| 1586 | 3644 | GCGGCGUCGGCUACAGCUC | 4980 | GAGCUGUAGCCGACGCCGC | 68.1 | 53.1 |
| 1587 | 3645 | CGGCGUCGGCUACAGCUCC | 4981 | GGAGCUGUAGCCGACGCCG | 63.5 | 48.5 |
| 1588 | 3646 | GGCGUCGGCUACAGCUCCG | 4982 | CGGAGCUGUAGCCGACGCC | 66.2 | 51.2 |
| 1589 | 3647 | GCGUCGGCUACAGCUCCGG | 4983 | CCGGAGCUGUAGCCGACGC | 59.9 | 44.9 |
| 1590 | 3648 | CGUCGGCUACAGCUCCGGG | 4984 | CCCGGAGCUGUAGCCGACG | 59.1 | 44.1 |
| 1591 | 3649 | GUCGGCUACAGCUCCGGGC | 4985 | GCCCGGAGCUGUAGCCGAC | 49.4 | 34.4 |
| 1592 | 3650 | UCGGCUACAGCUCCGGGCG | 4986 | CGCCCGGAGCUGUAGCCGA | 47.4 | 32.4 |
| 1593 | 3651 | CGGCUACAGCUCCGGGCGG | 4987 | CCGCCCGGAGCUGUAGCCG | 59.9 | 44.9 |
| 1594 | 3652 | GGCUACAGCUCCGGGCGGC | 4988 | GCCGCCCGGAGCUGUAGCC | 53.9 | 38.9 |
| 1595 | 3653 | GCUACAGCUCCGGGCGGCC | 4989 | GGCCGCCCGGAGCUGUAGC | 51.1 | 36.1 |
| 1627 | 3654 | AAACGGCCGCACUGGGACA | 4990 | UGUCCCAGUGCGGCCGUUU | 65.7 | 49.7 |
| 1628 | 3655 | AACGGCCGCACUGGGACAC | 4991 | GUGUCCCAGUGCGGCCGUU | 42.2 | 26.2 |
| 1629 | 3656 | ACGGCCGCACUGGGACACG | 4992 | CGUGUCCCAGUGCGGCCGU | 43.4 | 27.4 |
| 1630 | 3657 | CGGCCGCACUGGGACACGA | 4993 | UCGUGUCCCAGUGCGGCCG | 76.3 | 60.3 |
| 1631 | 3658 | GGCCGCACUGGGACACGAC | 4994 | GUCGUGUCCCAGUGCGGCC | 64.2 | 48.2 |
| 1632 | 3659 | GCCGCACUGGGACACGACC | 4995 | GGUCGUGUCCCAGUGCGGC | 59.2 | 43.2 |
| 1633 | 3660 | CCGCACUGGGACACGACCU | 4996 | AGGUCGUGUCCCAGUGCGG | 69.2 | 53.2 |
| 1634 | 3661 | CGCACUGGGACACGACCUG | 4997 | CAGGUCGUGUCCCAGUGCG | 67.7 | 51.7 |
| 1635 | 3662 | GCACUGGGACACGACCUGG | 4998 | CCAGGUCGUGUCCCAGUGC | 64 | 48 |
| 1636 | 3663 | CACUGGGACACGACCUGGA | 4999 | UCCAGGUCGUGUCCCAGUG | 78.7 | 62.7 |
| 1637 | 3664 | ACUGGGACACGACCUGGAC | 5000 | GUCCAGGUCGUGUCCCAGU | 62.5 | 46.5 |
| 1638 | 3665 | CUGGGACACGACCUGGACG | 5001 | CGUCCAGGUCGUGUCCCAG | 57.9 | 41.9 |
| 1639 | 3666 | UGGGACACGACCUGGACGG | 5002 | CCGUCCAGGUCGUGUCCCA | 51.3 | 35.3 |
| 1640 | 3667 | GGGACACGACCUGGACGGG | 5003 | CCCGUCCAGGUCGUGUCCC | 59.6 | 43.6 |
| 1641 | 3668 | GGACACGACCUGGACGGGC | 5004 | GCCCGUCCAGGUCGUGUCC | 55.3 | 39.3 |
| 1642 | 3669 | GACACGACCUGGACGGGCA | 5005 | UGCCCGUCCAGGUCGUGUC | 82 | 66 |
| 1643 | 3670 | ACACGACCUGGACGGGCAG | 5006 | CUGCCCGUCCAGGUCGUGU | 63.6 | 47.6 |
| 1644 | 3671 | CACGACCUGGACGGGCAGG | 5007 | CCUGCCCGUCCAGGUCGUG | 51.2 | 35.2 |
| 1645 | 3672 | ACGACCUGGACGGGCAGGA | 5008 | UCCUGCCCGUCCAGGUCGU | 61.7 | 45.7 |
| 1646 | 3673 | CGACCUGGACGGGCAGGAC | 5009 | GUCCUGCCCGUCCAGGUCG | 63.9 | 47.9 |
| 1647 | 3674 | GACCUGGACGGGCAGGACG | 5010 | CGUCCUGCCCGUCCAGGUC | 60.6 | 44.6 |
| 1648 | 3675 | ACCUGGACGGGCAGGACGC | 5011 | GCGUCCUGCCCGUCCAGGU | 50.8 | 34.8 |
| 1649 | 3676 | CCUGGACGGGCAGGACGCG | 5012 | CGCGUCCUGCCCGUCCAGG | 52.2 | 36.2 |
| 1650 | 3677 | CUGGACGGGCAGGACGCGG | 5013 | CCGCGUCCUGCCCGUCCAG | 45.9 | 29.9 |
| 1651 | 3678 | UGGACGGGCAGGACGCGGA | 5014 | UCCGCGUCCUGCCCGUCCA | 65 | 49 |
| 1652 | 3679 | GGACGGGCAGGACGCGGAU | 5015 | AUCCGCGUCCUGCCCGUCC | 79.4 | 63.4 |
| 1653 | 3680 | GACGGGCAGGACGCGGAUG | 5016 | CAUCCGCGUCCUGCCCGUC | 61.6 | 45.6 |
| 1654 | 3681 | ACGGGCAGGACGCGGAUGA | 5017 | UCAUCCGCGUCCUGCCCGU | 66.8 | 50.8 |
| 1655 | 3682 | CGGGCAGGACGCGGAUGAG | 5018 | CUCAUCCGCGUCCUGCCCG | 64.4 | 48.4 |
| 1656 | 3683 | GGGCAGGACGCGGAUGAGG | 5019 | CCUCAUCCGCGUCCUGCCC | 59 | 43 |
| 1657 | 3684 | GGCAGGACGCGGAUGAGGA | 5020 | UCCUCAUCCGCGUCCUGCC | 81.1 | 65.1 |
| 1658 | 3685 | GCAGGACGCGGAUGAGGAU | 5021 | AUCCUCAUCCGCGUCCUGC | 82.1 | 66.1 |
| 1659 | 3686 | CAGGACGCGGAUGAGGAUG | 5022 | CAUCCUCAUCCGCGUCCUG | 60.9 | 44.9 |
| 1660 | 3687 | AGGACGCGGAUGAGGAUGC | 5023 | GCAUCCUCAUCCGCGUCCU | 56.2 | 40.2 |
| 1661 | 3688 | GGACGCGGAUGAGGAUGCC | 5024 | GGCAUCCUCAUCCGCGUCC | 60.4 | 44.4 |
| 1694 | 3689 | GGGACAGCAGUAUGCAGAU | 5025 | AUCUGCAUACUGCUGUCCC | 86.9 | 70.9 |
| 1695 | 3690 | GGACAGCAGUAUGCAGAUG | 5026 | CAUCUGCAUACUGCUGUCC | 79.5 | 63.5 |
| 1696 | 3691 | GACAGCAGUAUGCAGAUGA | 5027 | UCAUCUGCAUACUGCUGUC | 85.6 | 69.6 |
| 1697 | 3692 | ACAGCAGUAUGCAGAUGAC | 5028 | GUCAUCUGCAUACUGCUGU | 73.3 | 57.3 |
| 1698 | 3693 | CAGCAGUAUGCAGAUGACU | 5029 | AGUCAUCUGCAUACUGCUG | 77.2 | 61.2 |
| 1699 | 3694 | AGCAGUAUGCAGAUGACUG | 5030 | CAGUCAUCUGCAUACUGCU | 72.7 | 56.7 |
| 1700 | 3695 | GCAGUAUGCAGAUGACUGG | 5031 | CCAGUCAUCUGCAUACUGC | 72.9 | 55.9 |
| 1701 | 3696 | CAGUAUGCAGAUGACUGGA | 5032 | UCCAGUCAUCUGCAUACUG | 82.4 | 65.4 |
| 1702 | 3697 | AGUAUGCAGAUGACUGGAU | 5033 | AUCCAGUCAUCUGCAUACU | 78.9 | 61.9 |
| 1703 | 3698 | GUAUGCAGAUGACUGGAUG | 5034 | CAUCCAGUCAUCUGCAUAC | 72.9 | 55.9 |
| 1704 | 3699 | UAUGCAGAUGACUGGAUGG | 5035 | CCAUCCAGUCAUCUGCAUA | 59 | 42 |
| 1739 | 3700 | CCCAGCCCGGCCUCCUCGG | 5036 | CCGAGGAGGCCGGGCUGGG | 46 | 29 |
| 1740 | 3701 | CCAGCCCGGCCUCCUCGGC | 5037 | GCCGAGGAGGCCGGGCUGG | 40.6 | 23.6 |
| 1741 | 3702 | CAGCCCGGCCUCCUCGGCC | 5038 | GGCCGAGGAGGCCGGGCUG | 37.2 | 20.2 |
| 1742 | 3703 | AGCCCGGCCUCCUCGGCCU | 5039 | AGGCCGAGGAGGCCGGGCU | 57.2 | 40.2 |
| 1743 | 3704 | GCCCGGCCUCCUCGGCCUC | 5040 | GAGGCCGAGGAGGCCGGGC | 52.7 | 35.7 |
| 1744 | 3705 | CCCGGCCUCCUCGGCCUCC | 5041 | GGAGGCCGAGGAGGCCGGG | 40.5 | 23.5 |
| 1745 | 3706 | CCGGCCUCCUCGGCCUCCA | 5042 | UGGAGGCCGAGGAGGCCGG | 64.4 | 47.4 |
| 1746 | 3707 | CGGCCUCCUCGGCCUCCAU | 5043 | AUGGAGGCCGAGGAGGCCG | 71 | 54 |
| 1747 | 3708 | GGCCUCCUCGGCCUCCAUA | 5044 | UAUGGAGGCCGAGGAGGCC | 74.4 | 57.4 |
| 1748 | 3709 | GCCUCCUCGGCCUCCAUAC | 5045 | GUAUGGAGGCCGAGGAGGC | 59.4 | 42.4 |
| 1749 | 3710 | CCUCCUCGGCCUCCAUACC | 5046 | GGUAUGGAGGCCGAGGAGG | 54.2 | 37.2 |
| 1750 | 3711 | CUCCUCGGCCUCCAUACCC | 5047 | GGGUAUGGAGGCCGAGGAG | 44.6 | 27.6 |
| 1751 | 3712 | UCCUCGGCCUCCAUACCCU | 5048 | AGGGUAUGGAGGCCGAGGA | 57.6 | 40.6 |
| 1752 | 3713 | CCUCGGCCUCCAUACCCUC | 5049 | GAGGGUAUGGAGGCCGAGG | 59.4 | 42.4 |
| 1753 | 3714 | CUCGGCCUCCAUACCCUCC | 5050 | GGAGGGUAUGGAGGCCGAG | 47.2 | 30.2 |
| 1754 | 3715 | UCGGCCUCCAUACCCUCCU | 5051 | AGGAGGGUAUGGAGGCCGA | 51.3 | 34.3 |
| 1755 | 3716 | CGGCCUCCAUACCCUCCUA | 5052 | UAGGAGGGUAUGGAGGCCG | 85.3 | 68.3 |
| 1756 | 3717 | GGCCUCCAUACCCUCCUAG | 5053 | CUAGGAGGGUAUGGAGGCC | 63.5 | 46.5 |
| 1757 | 3718 | GCCUCCAUACCCUCCUAGA | 5054 | UCUAGGAGGGUAUGGAGGC | 80.9 | 63.9 |
| 1758 | 3719 | CCUCCAUACCCUCCUAGAA | 5055 | UUCUAGGAGGGUAUGGAGG | 87.4 | 70.4 |
| 1759 | 3720 | CUCCAUACCCUCCUAGAAG | 5056 | CUUCUAGGAGGGUAUGGAG | 66.2 | 49.2 |
| 1760 | 3721 | UCCAUACCCUCCUAGAAGG | 5057 | CCUUCUAGGAGGGUAUGGA | 56.5 | 39.5 |
| 1761 | 3722 | CCAUACCCUCCUAGAAGGG | 5058 | CCCUUCUAGGAGGGUAUGG | 58 | 41 |
| 1762 | 3723 | CAUACCCUCCUAGAAGGGA | 5059 | UCCCUUCUAGGAGGGUAUG | 70 | 53 |
| 1763 | 3724 | AUACCCUCCUAGAAGGGAU | 5060 | AUCCCUUCUAGGAGGGUAU | 69.6 | 52.6 |
| 1764 | 3725 | UACCCUCCUAGAAGGGAUG | 5061 | CAUCCCUUCUAGGAGGGUA | 57.9 | 40.9 |
| 1765 | 3726 | ACCCUCCUAGAAGGGAUGG | 5062 | CCAUCCCUUCUAGGAGGGU | 50.6 | 33.6 |
| 1766 | 3727 | CCCUCCUAGAAGGGAUGGU | 5063 | ACCAUCCCUUCUAGGAGGG | 64.3 | 47.3 |
| 1767 | 3728 | CCUCCUAGAAGGGAUGGUU | 5064 | AACCAUCCCUUCUAGGAGG | 77.1 | 60.1 |
| 1768 | 3729 | CUCCUAGAAGGGAUGGUUC | 5065 | GAACCAUCCCUUCUAGGAG | 66.9 | 49.9 |
| 1769 | 3730 | UCCUAGAAGGGAUGGUUCU | 5066 | AGAACCAUCCCUUCUAGGA | 72.2 | 55.2 |
| 1770 | 3731 | CCUAGAAGGGAUGGUUCUG | 5067 | CAGAACCAUCCCUUCUAGG | 70.8 | 53.8 |
| 1771 | 3732 | CUAGAAGGGAUGGUUCUGG | 5068 | CCAGAACCAUCCCUUCUAG | 57.6 | 40.6 |
| 1772 | 3733 | UAGAAGGGAUGGUUCUGGG | 5069 | CCCAGAACCAUCCCUUCUA | 53.5 | 36.5 |
| 1806 | 3734 | GGCAGUGCCCGCUACAACC | 5070 | GGUUGUAGCGGGCACUGCC | 65.6 | 47.6 |
| 1807 | 3735 | GCAGUGCCCGCUACAACCA | 5071 | UGGUUGUAGCGGGCACUGC | 82.2 | 64.2 |
| 1808 | 3736 | CAGUGCCCGCUACAACCAG | 5072 | CUGGUUGUAGCGGGCACUG | 66.1 | 48.1 |
| 1809 | 3737 | AGUGCCCGCUACAACCAGG | 5073 | CCUGGUUGUAGCGGGCACU | 58.7 | 40.7 |
| 1810 | 3738 | GUGCCCGCUACAACCAGGG | 5074 | CCCUGGUUGUAGCGGGCAC | 49.7 | 31.7 |
| 1811 | 3739 | UGCCCGCUACAACCAGGGC | 5075 | GCCCUGGUUGUAGCGGGCA | 43.9 | 25.9 |
| 1812 | 3740 | GCCCGCUACAACCAGGGCC | 5076 | GGCCCUGGUUGUAGCGGGC | 47.4 | 29.4 |
| 1813 | 3741 | CCCGCUACAACCAGGGCCG | 5077 | CGGCCCUGGUUGUAGCGGG | 53.5 | 35.5 |
| 1814 | 3742 | CCGCUACAACCAGGGCCGG | 5078 | CCGGCCCUGGUUGUAGCGG | 51.1 | 33.1 |
| 1815 | 3743 | CGCUACAACCAGGGCCGGA | 5079 | UCCGGCCCUGGUUGUAGCG | 68.4 | 50.4 |
| 1816 | 3744 | GCUACAACCAGGGCCGGAG | 5080 | CUCCGGCCCUGGUUGUAGC | 59.8 | 41.8 |
| 1817 | 3745 | CUACAACCAGGGCCGGAGC | 5081 | GCUCCGGCCCUGGUUGUAG | 50 | 32 |
| 1818 | 3746 | UACAACCAGGGCCGGAGCA | 5082 | UGCUCCGGCCCUGGUUGUA | 56.5 | 38.5 |
| 1819 | 3747 | ACAACCAGGGCCGGAGCAG | 5083 | CUGCUCCGGCCCUGGUUGU | 49.1 | 31.1 |
| 1820 | 3748 | CAACCAGGGCCGGAGCAGG | 5084 | CCUGCUCCGGCCCUGGUUG | 50.5 | 32.5 |
| 1821 | 3749 | AACCAGGGCCGGAGCAGGA | 5085 | UCCUGCUCCGGCCCUGGUU | 63.2 | 45.2 |
| 1822 | 3750 | ACCAGGGCCGGAGCAGGAG | 5086 | CUCCUGCUCCGGCCCUGGU | 49.6 | 31.6 |
| 1823 | 3751 | CCAGGGCCGGAGCAGGAGU | 5087 | ACUCCUGCUCCGGCCCUGG | 63.6 | 45.6 |
| 1824 | 3752 | CAGGGCCGGAGCAGGAGUG | 5088 | CACUCCUGCUCCGGCCCUG | 55 | 37 |
| 1825 | 3753 | AGGGCCGGAGCAGGAGUGG | 5089 | CCACUCCUGCUCCGGCCCU | 46.5 | 28.5 |
| 1826 | 3754 | GGGCCGGAGCAGGAGUGGG | 5090 | CCCACUCCUGCUCCGGCCC | 53.3 | 35.3 |
| 1860 | 3755 | UUUCACACCCAAACCAUCC | 5091 | GGAUGGUUUGGGUGUGAAA | 44 | 26 |
| 1861 | 3756 | UUCACACCCAAACCAUCCU | 5092 | AGGAUGGUUUGGGUGUGAA | 56.1 | 38.1 |
| 1862 | 3757 | UCACACCCAAACCAUCCUC | 5093 | GAGGAUGGUUUGGGUGUGA | 50.3 | 32.3 |
| 1863 | 3758 | CACACCCAAACCAUCCUCA | 5094 | UGAGGAUGGUUUGGGUGUG | 72.6 | 54.6 |
| 1864 | 3759 | ACACCCAAACCAUCCUCAU | 5095 | AUGAGGAUGGUUUGGGUGU | 71.6 | 53.6 |
| 1865 | 3760 | CACCCAAACCAUCCUCAUU | 5096 | AAUGAGGAUGGUUUGGGUG | 75.6 | 57.6 |
| 1866 | 3761 | ACCCAAACCAUCCUCAUUC | 5097 | GAAUGAGGAUGGUUUGGGU | 56 | 38 |
| 1867 | 3762 | CCCAAACCAUCCUCAUUCU | 5098 | AGAAUGAGGAUGGUUUGGG | 75.4 | 57.4 |
| 1868 | 3763 | CCAAACCAUCCUCAUUCUC | 5099 | GAGAAUGAGGAUGGUUUGG | 62.7 | 44.7 |
| 1869 | 3764 | CAAACCAUCCUCAUUCUCU | 5100 | AGAGAAUGAGGAUGGUUUG | 69.9 | 51.9 |
| 1870 | 3765 | AAACCAUCCUCAUUCUCUC | 5101 | GAGAGAAUGAGGAUGGUUU | 61.5 | 43.5 |
| 1871 | 3766 | AACCAUCCUCAUUCUCUCC | 5102 | GGAGAGAAUGAGGAUGGUU | 54 | 36 |
| 1872 | 3767 | ACCAUCCUCAUUCUCUCCC | 5103 | GGGAGAGAAUGAGGAUGGU | 45 | 27 |
| 1873 | 3768 | CCAUCCUCAUUCUCUCCCU | 5104 | AGGGAGAGAAUGAGGAUGG | 71.6 | 53.6 |
| 1874 | 3769 | CAUCCUCAUUCUCUCCCUC | 5105 | GAGGGAGAGAAUGAGGAUG | 64 | 46 |
| 1875 | 3770 | AUCCUCAUUCUCUCCCUCU | 5106 | AGAGGGAGAGAAUGAGGAU | 60.3 | 42.3 |
| 1876 | 3771 | UCCUCAUUCUCUCCCUCUC | 5107 | GAGAGGGAGAGAAUGAGGA | 59.3 | 41.3 |
| 1877 | 3772 | CCUCAUUCUCUCCCUCUCA | 5108 | UGAGAGGGAGAGAAUGAGG | 81.8 | 63.8 |
| 1878 | 3773 | CUCAUUCUCUCCCUCUCAG | 5109 | CUGAGAGGGAGAGAAUGAG | 65.2 | 47.2 |
| 1879 | 3774 | UCAUUCUCUCCCUCUCAGC | 5110 | GCUGAGAGGGAGAGAAUGA | 49 | 31 |
| 1880 | 3775 | CAUUCUCUCCCUCUCAGCC | 5111 | GGCUGAGAGGGAGAGAAUG | 53.9 | 35.9 |
| 1881 | 3776 | AUUCUCUCCCUCUCAGCCC | 5112 | GGGCUGAGAGGGAGAGAAU | 43.8 | 25.8 |
| 1882 | 3777 | UUCUCUCCCUCUCAGCCCU | 5113 | AGGGCUGAGAGGGAGAGAA | 57.1 | 39.1 |
| 1883 | 3778 | UCUCUCCCUCUCAGCCCUG | 5114 | CAGGGCUGAGAGGGAGAGA | 50.4 | 32.4 |
| 1884 | 3779 | CUCUCCCUCUCAGCCCUGG | 5115 | CCAGGGCUGAGAGGGAGAG | 49.2 | 31.2 |
| 1901 | 3780 | GGCCCUGCUUGGACCUCGA | 5116 | UCGAGGUCCAAGCAGGGCC | 86.5 | 67.5 |
| 1902 | 3781 | GCCCUGCUUGGACCUCGAU | 5117 | AUCGAGGUCCAAGCAGGGC | 79 | 60 |
| 1903 | 3782 | CCCUGCUUGGACCUCGAUA | 5118 | UAUCGAGGUCCAAGCAGGG | 84.1 | 65.1 |
| 1904 | 3783 | CCUGCUUGGACCUCGAUAA | 5119 | UUAUCGAGGUCCAAGCAGG | 90.9 | 71.9 |
| 1905 | 3784 | CUGCUUGGACCUCGAUAAC | 5120 | GUUAUCGAGGUCCAAGCAG | 67.5 | 48.5 |
| 1906 | 3785 | UGCUUGGACCUCGAUAACG | 5121 | CGUUAUCGAGGUCCAAGCA | 57.4 | 38.4 |
| 1907 | 3786 | GCUUGGACCUCGAUAACGG | 5122 | CCGUUAUCGAGGUCCAAGC | 71.9 | 52.9 |
| 1908 | 3787 | CUUGGACCUCGAUAACGGG | 5123 | CCCGUUAUCGAGGUCCAAG | 59.3 | 40.3 |
| 1931 | 3788 | GGGUGCCCUAGCAUCAGAA | 5124 | UUCUGAUGCUAGGGCACCC | 85.5 | 66.5 |
| 1932 | 3789 | GGUGCCCUAGCAUCAGAAG | 5125 | CUUCUGAUGCUAGGGCACC | 73.8 | 54.8 |
| 1933 | 3790 | GUGCCCUAGCAUCAGAAGG | 5126 | CCUUCUGAUGCUAGGGCAC | 60.7 | 41.7 |
| 1934 | 3791 | UGCCCUAGCAUCAGAAGGG | 5127 | CCCUUCUGAUGCUAGGGCA | 51.8 | 32.8 |
| 1935 | 3792 | GCCCUAGCAUCAGAAGGGU | 5128 | ACCCUUCUGAUGCUAGGGC | 71.1 | 52.1 |
| 1936 | 3793 | CCCUAGCAUCAGAAGGGUU | 5129 | AACCCUUCUGAUGCUAGGG | 80.8 | 61.8 |
| 1937 | 3794 | CCUAGCAUCAGAAGGGUUC | 5130 | GAACCCUUCUGAUGCUAGG | 68.3 | 49.3 |
| 1938 | 3795 | CUAGCAUCAGAAGGGUUCA | 5131 | UGAACCCUUCUGAUGCUAG | 81.4 | 62.4 |
| 1939 | 3796 | UAGCAUCAGAAGGGUUCAU | 5132 | AUGAACCCUUCUGAUGCUA | 68.2 | 49.2 |
| 1940 | 3797 | AGCAUCAGAAGGGUUCAUG | 5133 | CAUGAACCCUUCUGAUGCU | 59.3 | 40.3 |
| 1941 | 3798 | GCAUCAGAAGGGUUCAUGG | 5134 | CCAUGAACCCUUCUGAUGC | 69.9 | 50.9 |
| 2008 | 3799 | GGGCUGCAGAGAGGGUAGA | 5135 | UCUACCCUCUCUGCAGCCC | 79.1 | 59.1 |
| 2009 | 3800 | GGCUGCAGAGAGGGUAGAG | 5136 | CUCUACCCUCUCUGCAGCC | 68.1 | 48.1 |
| 2010 | 3801 | GCUGCAGAGAGGGUAGAGA | 5137 | UCUCUACCCUCUCUGCAGC | 80.9 | 60.9 |
| 2011 | 3802 | CUGCAGAGAGGGUAGAGAA | 5138 | UUCUCUACCCUCUCUGCAG | 86.8 | 66.8 |
| 2012 | 3803 | UGCAGAGAGGGUAGAGAAG | 5139 | CUUCUCUACCCUCUCUGCA | 68.6 | 48.6 |
| 2013 | 3804 | GCAGAGAGGGUAGAGAAGG | 5140 | CCUUCUCUACCCUCUCUGC | 65.8 | 45.8 |
| 2014 | 3805 | CAGAGAGGGUAGAGAAGGG | 5141 | CCCUUCUCUACCCUCUCUG | 64.6 | 44.6 |
| 2015 | 3806 | AGAGAGGGUAGAGAAGGGA | 5142 | UCCCUUCUCUACCCUCUCU | 73 | 53 |
| 2016 | 3807 | GAGAGGGUAGAGAAGGGAC | 5143 | GUCCCUUCUCUACCCUCUC | 67.7 | 47.7 |
| 2017 | 3808 | AGAGGGUAGAGAAGGGACU | 5144 | AGUCCCUUCUCUACCCUCU | 72.3 | 52.3 |
| 2018 | 3809 | GAGGGUAGAGAAGGGACUU | 5145 | AAGUCCCUUCUCUACCCUC | 77.2 | 57.2 |
| 2019 | 3810 | AGGGUAGAGAAGGGACUUU | 5146 | AAAGUCCCUUCUCUACCCU | 71.1 | 51.1 |
| 2020 | 3811 | GGGUAGAGAAGGGACUUUG | 5147 | CAAAGUCCCUUCUCUACCC | 72.9 | 52.9 |
| 2021 | 3812 | GGUAGAGAAGGGACUUUGC | 5148 | GCAAAGUCCCUUCUCUACC | 72.2 | 52.2 |
| 2022 | 3813 | GUAGAGAAGGGACUUUGCA | 5149 | UGCAAAGUCCCUUCUCUAC | 80.5 | 60.5 |
| 2023 | 3814 | UAGAGAAGGGACUUUGCAG | 5150 | CUGCAAAGUCCCUUCUCUA | 61.1 | 41.1 |
| 2024 | 3815 | AGAGAAGGGACUUUGCAGG | 5151 | CCUGCAAAGUCCCUUCUCU | 59.1 | 39.1 |
| 2025 | 3816 | GAGAAGGGACUUUGCAGGU | 5152 | ACCUGCAAAGUCCCUUCUC | 72.5 | 52.5 |
| 2026 | 3817 | AGAAGGGACUUUGCAGGUG | 5153 | CACCUGCAAAGUCCCUUCU | 64.1 | 44.1 |
| 2027 | 3818 | GAAGGGACUUUGCAGGUGA | 5154 | UCACCUGCAAAGUCCCUUC | 85.3 | 65.3 |
| 2028 | 3819 | AAGGGACUUUGCAGGUGAA | 5155 | UUCACCUGCAAAGUCCCUU | 83.6 | 63.6 |
| 2029 | 3820 | AGGGACUUUGCAGGUGAAU | 5156 | AUUCACCUGCAAAGUCCCU | 69.9 | 49.9 |
| 2030 | 3821 | GGGACUUUGCAGGUGAAUG | 5157 | CAUUCACCUGCAAAGUCCC | 68.8 | 48.8 |
| 2031 | 3822 | GGACUUUGCAGGUGAAUGG | 5158 | CCAUUCACCUGCAAAGUCC | 71.3 | 51.3 |
| 2073 | 3823 | UUUCAUCAGAGGUGGGUGG | 5159 | CCACCCACCUCUGAUGAAA | 47.2 | 27.2 |
| 2074 | 3824 | UUCAUCAGAGGUGGGUGGG | 5160 | CCCACCCACCUCUGAUGAA | 36.8 | 16.8 |
| 2075 | 3825 | UCAUCAGAGGUGGGUGGGU | 5161 | ACCCACCCACCUCUGAUGA | 54 | 34 |
| 2076 | 3826 | CAUCAGAGGUGGGUGGGUG | 5162 | CACCCACCCACCUCUGAUG | 60.3 | 40.3 |
| 2077 | 3827 | AUCAGAGGUGGGUGGGUGU | 5163 | ACACCCACCCACCUCUGAU | 62.7 | 42.7 |
| 2078 | 3825 | UCAGAGGUGGGUGGGUGUU | 5164 | AACACCCACCCACCUCUGA | 64.8 | 44.8 |
| 2079 | 3829 | CAGAGGUGGGUGGGUGUUC | 5165 | GAACACCCACCCACCUCUG | 62.5 | 42.5 |
| 2080 | 3830 | AGAGGUGGGUGGGUGUUCA | 5166 | UGAACACCCACCCACCUCU | 79.5 | 59.5 |
| 2081 | 3831 | GAGGUGGGUGGGUGUUCAC | 5167 | GUGAACACCCACCCACCUC | 68.7 | 48.7 |
| 2082 | 3832 | AGGUGGGUGGGUGUUCACA | 5168 | UGUGAACACCCACCCACCU | 75.5 | 55.5 |
| 2083 | 3833 | GGUGGGUGGGUGUUCACAA | 5169 | UUGUGAACACCCACCCACC | 93.7 | 73.7 |
| 2084 | 3834 | GUGGGUGGGUGUUCACAAU | 5170 | AUUGUGAACACCCACCCAC | 84.9 | 64.9 |
| 2085 | 3835 | UGGGUGGGUGUUCACAAUA | 5171 | UAUUGUGAACACCCACCCA | 80.9 | 60.9 |
| 2086 | 3836 | GGGUGGGUGUUCACAAUAU | 5172 | AUAUUGUGAACACCCACCC | 93.1 | 73.1 |
| 2087 | 3837 | GGUGGGUGUUCACAAUAUU | 5173 | AAUAUUGUGAACACCCACC | 94.8 | 74.8 |
| 2088 | 3838 | GUGGGUGUUCACAAUAUUU | 5174 | AAAUAUUGUGAACACCCAC | 85.8 | 65.8 |
| 2089 | 3839 | UGGGUGUUCACAAUAUUUA | 5175 | UAAAUAUUGUGAACACCCA | 84.3 | 64.3 |
| 2090 | 3840 | GGGUGUUCACAAUAUUUAU | 5176 | AUAAAUAUUGUGAACACCC | 96 | 76 |
| 2091 | 3841 | GGUGUUCACAAUAUUUAUU | 5177 | AAUAAAUAUUGUGAACACC | 89.4 | 69.4 |
| 2092 | 3842 | GUGUUCACAAUAUUUAUUU | 5178 | AAAUAAAUAUUGUGAACAC | 79.7 | 59.7 |
| 2111 | 3843 | UUUCAUUUGGUAAUGGGAG | 5179 | CUCCCAUUACCAAAUGAAA | 49.8 | 28.8 |
| 2112 | 3844 | UUCAUUUGGUAAUGGGAGG | 5180 | CCUCCCAUUACCAAAUGAA | 47.5 | 26.5 |
| 2113 | 3845 | UCAUUUGGUAAUGGGAGGG | 5181 | CCCUCCCAUUACCAAAUGA | 40.3 | 19.3 |
| 2140 | 3846 | GGGUAUUUAUUUAGGAGGG | 5182 | CCCUCCUAAAUAAAUACCC | 64.6 | 43.6 |
| 2141 | 3847 | GGUAUUUAUUUAGGAGGGA | 5183 | UCCCUCCUAAAUAAAUACC | 78.8 | 57.8 |
| 2142 | 3848 | GUAUUUAUUUAGGAGGGAG | 5184 | CUCCCUCCUAAAUAAAUAC | 62.4 | 41.4 |
| 2143 | 3849 | UAUUUAUUUAGGAGGGAGU | 5185 | ACUCCCUCCUAAAUAAAUA | 59.9 | 38.9 |
| 2144 | 3850 | AUUUAUUUAGGAGGGAGUG | 5186 | CACUCCCUCCUAAAUAAAU | 53.3 | 32.3 |
| 2145 | 3851 | UUUAUUUAGGAGGGAGUGU | 5187 | ACACUCCCUCCUAAAUAAA | 54.1 | 33.1 |
| 2146 | 3852 | UUAUUUAGGAGGGAGUGUG | 5188 | CACACUCCCUCCUAAAUAA | 50 | 29 |
| 2147 | 3853 | UAUUUAGGAGGGAGUGUGG | 5189 | CCACACUCCCUCCUAAAUA | 54.3 | 33.3 |
| 2148 | 3854 | AUUUAGGAGGGAGUGUGGU | 5190 | ACCACACUCCCUCCUAAAU | 57.2 | 36.2 |
| 2149 | 3855 | UUUAGGAGGGAGUGUGGUU | 5191 | AACCACACUCCCUCCUAAA | 64.1 | 43.1 |
| 2150 | 3856 | UUAGGAGGGAGUGUGGUUU | 5192 | AAACCACACUCCCUCCUAA | 61.2 | 40.2 |
| 2151 | 3857 | UAGGAGGGAGUGUGGUUUC | 5193 | GAAACCACACUCCCUCCUA | 58.6 | 37.6 |
| 2152 | 3858 | AGGAGGGAGUGUGGUUUCC | 5194 | GGAAACCACACUCCCUCCU | 59.7 | 38.7 |
| 2153 | 3859 | GGAGGGAGUGUGGUUUCCU | 5195 | AGGAAACCACACUCCCUCC | 74.6 | 53.6 |
| 2154 | 3860 | GAGGGAGUGUGGUUUCCUU | 5196 | AAGGAAACCACACUCCCUC | 83.7 | 62.7 |
| 2155 | 3861 | AGGGAGUGUGGUUUCCUUA | 5197 | UAAGGAAACCACACUCCCU | 86.5 | 65.5 |
| 2156 | 3862 | GGGAGUGUGGUUUCCUUAG | 5198 | CUAAGGAAACCACACUCCC | 79.6 | 58.6 |
| 2157 | 3863 | GGAGUGUGGUUUCCUUAGA | 5199 | UCUAAGGAAACCACACUCC | 95.1 | 74.1 |
| 2158 | 3864 | GAGUGUGGUUUCCUUAGAA | 5200 | UUCUAAGGAAACCACACUC | 96.5 | 75.5 |
| 2159 | 3865 | AGUGUGGUUUCCUUAGAAG | 5201 | CUUCUAAGGAAACCACACU | 76.7 | 55.7 |
| 2160 | 3866 | GUGUGGUUUCCUUAGAAGG | 5202 | CCUUCUAAGGAAACCACAC | 71.6 | 50.6 |
| 2161 | 3867 | UGUGGUUUCCUUAGAAGGU | 5203 | ACCUUCUAAGGAAACCACA | 73.5 | 52.5 |
| 2162 | 3868 | GUGGUUUCCUUAGAAGGUA | 5204 | UACCUUCUAAGGAAACCAC | 87.8 | 66.8 |
| 2163 | 3869 | UGGUUUCCUUAGAAGGUAU | 5205 | AUACCUUCUAAGGAAACCA | 83 | 62 |
| 2164 | 3870 | GGUUUCCUUAGAAGGUAUA | 5206 | UAUACCUUCUAAGGAAACC | 94.8 | 73.8 |
| 2165 | 3871 | GUUUCCUUAGAAGGUAUAG | 5207 | CUAUACCUUCUAAGGAAAC | 71 | 50 |
| 2166 | 3872 | UUUCCUUAGAAGGUAUAGU | 5208 | ACUAUACCUUCUAAGGAAA | 60 | 39 |
| 2167 | 3873 | UUCCUUAGAAGGUAUAGUC | 5209 | GACUAUACCUUCUAAGGAA | 57.5 | 36.5 |
| 2168 | 3874 | UCCUUAGAAGGUAUAGUCU | 5210 | AGACUAUACCUUCUAAGGA | 72.3 | 51.3 |
| 2169 | 3875 | CCUUAGAAGGUAUAGUCUC | 5211 | GAGACUAUACCUUCUAAGG | 75.3 | 54.3 |
| 2170 | 3876 | CUUAGAAGGUAUAGUCUCU | 5212 | AGAGACUAUACCUUCUAAG | 82 | 61 |
| 2171 | 3877 | UUAGAAGGUAUAGUCUCUA | 5213 | UAGAGACUAUACCUUCUAA | 75.2 | 54.2 |
| 2172 | 3878 | UAGAAGGUAUAGUCUCUAG | 5214 | CUAGAGACUAUACCUUCUA | 72.6 | 51.6 |
| 2173 | 3879 | AGAAGGUAUAGUCUCUAGC | 5215 | GCUAGAGACUAUACCUUCU | 65.7 | 44.7 |
| 2174 | 3880 | GAAGGUAUAGUCUCUAGCC | 5216 | GGCUAGAGACUAUACCUUC | 66.5 | 45.5 |
| 2175 | 3881 | AAGGUAUAGUCUCUAGCCC | 5217 | GGGCUAGAGACUAUACCUU | 57.7 | 36.7 |
| 2176 | 3882 | AGGUAUAGUCUCUAGCCCU | 5218 | AGGGCUAGAGACUAUACCU | 75.3 | 54.3 |
| 2177 | 3883 | GGUAUAGUCUCUAGCCCUC | 5219 | GAGGGCUAGAGACUAUACC | 75.5 | 54.5 |
| 2178 | 3884 | GUAUAGUCUCUAGCCCUCU | 5220 | AGAGGGCUAGAGACUAUAC | 73.3 | 52.3 |
| 2179 | 3885 | UAUAGUCUCUAGCCCUCUA | 5221 | UAGAGGGCUAGAGACUAUA | 82.5 | 61.5 |
| 2180 | 3886 | AUAGUCUCUAGCCCUCUAA | 5222 | UUAGAGGGCUAGAGACUAU | 78.2 | 57.2 |
| 2181 | 3887 | UAGUCUCUAGCCCUCUAAG | 5223 | CUUAGAGGGCUAGAGACUA | 62.8 | 41.8 |
| 2182 | 3888 | AGUCUCUAGCCCUCUAAGG | 5224 | CCUUAGAGGGCUAGAGACU | 60.6 | 39.6 |
| 2183 | 3889 | GUCUCUAGCCCUCUAAGGC | 5225 | GCCUUAGAGGGCUAGAGAC | 56.1 | 35.1 |
| 2184 | 3890 | UCUCUAGCCCUCUAAGGCU | 5226 | AGCCUUAGAGGGCUAGAGA | 62.9 | 41.9 |
| 2185 | 3891 | CUCUAGCCCUCUAAGGCUG | 5227 | CAGCCUUAGAGGGCUAGAG | 67.1 | 46.1 |
| 2186 | 3892 | UCUAGCCCUCUAAGGCUGG | 5228 | CCAGCCUUAGAGGGCUAGA | 50.6 | 29.6 |
| 2187 | 3893 | CUAGCCCUCUAAGGCUGGG | 5229 | CCCAGCCUUAGAGGGCUAG | 48.7 | 27.7 |
| 2230 | 3894 | AAAUGAGGAGUUUAGAGUU | 5230 | AACUCUAAACUCCUCAUUU | 79.8 | 57.8 |
| 2231 | 3895 | AAUGAGGAGUUUAGAGUUG | 5231 | CAACUCUAAACUCCUCAUU | 73.3 | 51.3 |
| 2232 | 3896 | AUGAGGAGUUUAGAGUUGC | 5232 | GCAACUCUAAACUCCUCAU | 59.4 | 37.4 |
| 2233 | 3897 | UGAGGAGUUUAGAGUUGCA | 5233 | UGCAACUCUAAACUCCUCA | 84.9 | 62.9 |
| 2234 | 3898 | GAGGAGUUUAGAGUUGCAG | 5234 | CUGCAACUCUAAACUCCUC | 73.3 | 51.3 |
| 2235 | 3899 | AGGAGUUUAGAGUUGCAGC | 5235 | GCUGCAACUCUAAACUCCU | 66.1 | 44.1 |
| 2236 | 3900 | GGAGUUUAGAGUUGCAGCU | 5236 | AGCUGCAACUCUAAACUCC | 85.2 | 63.2 |
| 2237 | 3901 | GAGUUUAGAGUUGCAGCUG | 5237 | CAGCUGCAACUCUAAACUC | 75.7 | 53.7 |
| 2238 | 3902 | AGUUUAGAGUUGCAGCUGG | 5238 | CCAGCUGCAACUCUAAACU | 73.1 | 51.1 |
| 2239 | 3903 | GUUUAGAGUUGCAGCUGGG | 5239 | CCCAGCUGCAACUCUAAAC | 70.2 | 48.2 |
| 2262 | 3904 | GGGUUUGAAGGAAGUUGGA | 5240 | UCCAACUUCCUUCAAACCC | 90.2 | 68.2 |
| 2263 | 3905 | GGUUUGAAGGAAGUUGGAA | 5241 | UUCCAACUUCCUUCAAACC | 91.9 | 69.9 |
| 2264 | 3906 | GUUUGAAGGAAGUUGGAAG | 5242 | CUUCCAACUUCCUUCAAAC | 73.8 | 51.8 |
| 2265 | 3907 | UUUGAAGGAAGUUGGAAGU | 5243 | ACUUCCAACUUCCUUCAAA | 64.3 | 42.3 |
| 2266 | 3908 | UUGAAGGAAGUUGGAAGUG | 5244 | CACUUCCAACUUCCUUCAA | 55.7 | 33.7 |
| 2267 | 3909 | UGAAGGAAGUUGGAAGUGG | 5245 | CCACUUCCAACUUCCUUCA | 62.8 | 40.8 |
| 2268 | 3910 | GAAGGAAGUUGGAAGUGGG | 5246 | CCCACUUCCAACUUCCUUC | 72.5 | 50.5 |
| 2296 | 3911 | GGGCAUCUGGUCUCAGAAA | 5247 | UUUCUGAGACCAGAUGCCC | 90.5 | 68.5 |
| 2297 | 3912 | GGCAUCUGGUCUCAGAAAU | 5248 | AUUUCUGAGACCAGAUGCC | 84.6 | 62.6 |
| 2298 | 3913 | GCAUCUGGUCUCAGAAAUG | 5249 | CAUUUCUGAGACCAGAUGC | 77.1 | 55.1 |
| 2299 | 3914 | CAUCUGGUCUCAGAAAUGG | 5250 | CCAUUUCUGAGACCAGAUG | 65.4 | 43.4 |
| 2300 | 3915 | AUCUGGUCUCAGAAAUGGA | 5251 | UCCAUUUCUGAGACCAGAU | 76.8 | 53.8 |
| 2301 | 3916 | UCUGGUCUCAGAAAUGGAC | 5252 | GUCCAUUUCUGAGACCAGA | 60.2 | 37.2 |
| 2302 | 3917 | CUGGUCUCAGAAAUGGACC | 5253 | GGUCCAUUUCUGAGACCAG | 55.4 | 32.4 |
| 2303 | 3918 | UGGUCUCAGAAAUGGACCA | 5254 | UGGUCCAUUUCUGAGACCA | 76 | 53 |
| 2304 | 3919 | GGUCUCAGAAAUGGACCAG | 5255 | CUGGUCCAUUUCUGAGACC | 69.7 | 46.7 |
| 2305 | 3920 | GUCUCAGAAAUGGACCAGC | 5256 | GCUGGUCCAUUUCUGAGAC | 57.5 | 34.5 |
| 2306 | 3921 | UCUCAGAAAUGGACCAGCU | 5257 | AGCUGGUCCAUUUCUGAGA | 70.1 | 47.1 |
| 2307 | 3922 | CUCAGAAAUGGACCAGCUG | 5258 | CAGCUGGUCCAUUUCUGAG | 68.4 | 45.4 |
| 2308 | 3923 | UCAGAAAUGGACCAGCUGG | 5259 | CCAGCUGGUCCAUUUCUGA | 57.5 | 34.5 |
| 2309 | 3924 | CAGAAAUGGACCAGCUGGA | 5260 | UCCAGCUGGUCCAUUUCUG | 80.1 | 57.1 |
| 2310 | 3925 | AGAAAUGGACCAGCUGGAU | 5261 | AUCCAGCUGGUCCAUUUCU | 75.1 | 52.1 |
| 2311 | 3926 | GAAAUGGACCAGCUGGAUG | 5262 | CAUCCAGCUGGUCCAUUUC | 69.3 | 46.3 |
| 2312 | 3927 | AAAUGGACCAGCUGGAUGC | 5263 | GCAUCCAGCUGGUCCAUUU | 57.6 | 34.6 |
| 2313 | 3928 | AAUGGACCAGCUGGAUGCA | 5264 | UGCAUCCAGCUGGUCCAUU | 72.5 | 49.5 |
| 2314 | 3929 | AUGGACCAGCUGGAUGCAG | 5265 | CUGCAUCCAGCUGGUCCAU | 54.7 | 31.7 |
| 2315 | 3930 | UGGACCAGCUGGAUGCAGG | 5266 | CCUGCAUCCAGCUGGUCCA | 55.8 | 32.8 |
| 2316 | 3931 | GGACCAGCUGGAUGCAGGG | 5267 | CCCUGCAUCCAGCUGGUCC | 65.9 | 42.9 |
| 2317 | 3932 | GACCAGCUGGAUGCAGGGC | 5268 | GCCCUGCAUCCAGCUGGUC | 52.3 | 29.3 |
| 2318 | 3933 | ACCAGCUGGAUGCAGGGCA | 5269 | UGCCCUGCAUCCAGCUGGU | 65.5 | 42.5 |
| 2319 | 3934 | CCAGCUGGAUGCAGGGCAG | 5270 | CUGCCCUGCAUCCAGCUGG | 70.5 | 47.5 |
| 2320 | 3935 | CAGCUGGAUGCAGGGCAGG | 5271 | CCUGCCCUGCAUCCAGCUG | 55.3 | 32.3 |
| 2321 | 3936 | AGCUGGAUGCAGGGCAGGG | 5272 | CCCUGCCCUGCAUCCAGCU | 51 | 28 |
| 2338 | 3937 | GGGACUGAGGGUGCUUGAG | 5273 | CUCAAGCACCCUCAGUCCC | 66 | 43 |
| 2339 | 3938 | GGACUGAGGGUGCUUGAGU | 5274 | ACUCAAGCACCCUCAGUCC | 74.5 | 51.5 |
| 2340 | 3939 | GACUGAGGGUGCUUGAGUA | 5275 | UACUCAAGCACCCUCAGUC | 89.2 | 66.2 |
| 2341 | 3940 | ACUGAGGGUGCUUGAGUAG | 5276 | CUACUCAAGCACCCUCAGU | 66.2 | 43.2 |
| 2342 | 3941 | CUGAGGGUGCUUGAGUAGG | 5277 | CCUACUCAAGCACCCUCAG | 56.4 | 33.4 |
| 2343 | 3942 | UGAGGGUGCUUGAGUAGGA | 5278 | UCCUACUCAAGCACCCUCA | 76.1 | 53.1 |
| 2344 | 3943 | GAGGGUGCUUGAGUAGGAU | 5279 | AUCCUACUCAAGCACCCUC | 79.7 | 56.7 |
| 2345 | 3944 | AGGGUGCUUGAGUAGGAUG | 5280 | CAUCCUACUCAAGCACCCU | 67.9 | 44.9 |
| 2346 | 3945 | GGGUGCUUGAGUAGGAUGU | 5281 | ACAUCCUACUCAAGCACCC | 80.9 | 57.9 |
| 2347 | 3946 | GGUGCUUGAGUAGGAUGUG | 5282 | CACAUCCUACUCAAGCACC | 76.9 | 53.9 |
| 2348 | 3947 | GUGCUUGAGUAGGAUGUGA | 5283 | UCACAUCCUACUCAAGCAC | 85.4 | 62.4 |
| 2349 | 3948 | UGCUUGAGUAGGAUGUGAG | 5284 | CUCACAUCCUACUCAAGCA | 66.3 | 43.3 |
| 2350 | 3949 | GCUUGAGUAGGAUGUGAGA | 5285 | UCUCACAUCCUACUCAAGC | 93.2 | 70.2 |
| 2351 | 3950 | CUUGAGUAGGAUGUGAGAC | 5286 | GUCUCACAUCCUACUCAAG | 63.4 | 40.4 |
| 2352 | 3951 | UUGAGUAGGAUGUGAGACU | 5287 | AGUCUCACAUCCUACUCAA | 65 | 42 |
| 2353 | 3952 | UGAGUAGGAUGUGAGACUU | 5288 | AAGUCUCACAUCCUACUCA | 78.8 | 55.8 |
| 2354 | 3953 | GAGUAGGAUGUGAGACUUC | 5289 | GAAGUCUCACAUCCUACUC | 77.3 | 54.3 |
| 2355 | 3954 | AGUAGGAUGUGAGACUUCA | 5290 | UGAAGUCUCACAUCCUACU | 89.3 | 66.3 |
| 2356 | 3955 | GUAGGAUGUGAGACUUCAU | 5291 | AUGAAGUCUCACAUCCUAC | 85.3 | 65.3 |
| 2357 | 3956 | UAGGAUGUGAGACUUCAUG | 5292 | CAUGAAGUCUCACAUCCUA | 63 | 40 |
| 2358 | 3957 | AGGAUGUGAGACUUCAUGG | 5293 | CCAUGAAGUCUCACAUCCU | 65.9 | 42.9 |
| 2359 | 3958 | GGAUGUGAGACUUCAUGGG | 5294 | CCCAUGAAGUCUCACAUCC | 70.7 | 47.7 |
| 2360 | 3959 | GAUGUGAGACUUCAUGGGC | 5295 | GCCCAUGAAGUCUCACAUC | 61.5 | 38.5 |
| 2361 | 3960 | AUGUGAGACUUCAUGGGCC | 5296 | GGCCCAUGAAGUCUCACAU | 49.9 | 26.9 |
| 2362 | 3961 | UGUGAGACUUCAUGGGCCU | 5297 | AGGCCCAUGAAGUCUCACA | 66.8 | 43.8 |
| 2363 | 3962 | GUGAGACUUCAUGGGCCUG | 5298 | CAGGCCCAUGAAGUCUCAC | 59.5 | 36.5 |
| 2364 | 3963 | UGAGACUUCAUGGGCCUGG | 5299 | CCAGGCCCAUGAAGUCUCA | 43.8 | 20.8 |
| 2365 | 3964 | GAGACUUCAUGGGCCUGGG | 5300 | CCCAGGCCCAUGAAGUCUC | 55.5 | 32.5 |
| 2366 | 3965 | AGACUUCAUGGGCCUGGGU | 5301 | ACCCAGGCCCAUGAAGUCU | 61 | 38 |
| 2367 | 3966 | GACUUCAUGGGCCUGGGUU | 5302 | AACCCAGGCCCAUGAAGUC | 67 | 44 |
| 2368 | 3967 | ACUUCAUGGGCCUGGGUUC | 5303 | GAACCCAGGCCCAUGAAGU | 56.4 | 33.4 |
| 2369 | 3968 | CUUCAUGGGCCUGGGUUCU | 5304 | AGAACCCAGGCCCAUGAAG | 61.3 | 38.3 |
| 2370 | 3969 | UUCAUGGGCCUGGGUUCUG | 5305 | CAGAACCCAGGCCCAUGAA | 42.7 | 19.7 |
| 2371 | 3970 | UCAUGGGCCUGGGUUCUGU | 5306 | ACAGAACCCAGGCCCAUGA | 57.2 | 34.2 |
| 2372 | 3971 | CAUGGGCCUGGGUUCUGUU | 5307 | AACAGAACCCAGGCCCAUG | 71.8 | 48.8 |
| 2373 | 3972 | AUGGGCCUGGGUUCUGUUG | 5308 | CAACAGAACCCAGGCCCAU | 53.4 | 30.4 |
| 2374 | 3973 | UGGGCCUGGGUUCUGUUGA | 5309 | UCAACAGAACCCAGGCCCA | 65.7 | 42.7 |
| 2375 | 3974 | GGGCCUGGGUUCUGUUGAG | 5310 | CUCAACAGAACCCAGGCCC | 71.5 | 48.5 |
| 2376 | 3975 | GGCCUGGGUUCUGUUGAGU | 5311 | ACUCAACAGAACCCAGGCC | 72.9 | 49.9 |
| 2377 | 3976 | GCCUGGGUUCUGUUGAGUU | 5312 | AACUCAACAGAACCCAGGC | 82.3 | 59.3 |
| 2378 | 3977 | CCUGGGUUCUGUUGAGUUU | 5313 | AAACUCAACAGAACCCAGG | 88.6 | 65.6 |
| 2397 | 3978 | UUUCAGUAUCAAUUUCUUA | 5314 | UAAGAAAUUGAUACUGAAA | 78.5 | 55.5 |
| 2398 | 3979 | UUCAGUAUCAAUUUCUUAA | 5315 | UUAAGAAAUUGAUACUGAA | 78.5 | 55.5 |
| 2399 | 3980 | UCAGUAUCAAUUUCUUAAA | 5316 | UUUAAGAAAUUGAUACUGA | 83.1 | 60.1 |
| 2400 | 3981 | CAGUAUCAAUUUCUUAAAC | 5317 | GUUUAAGAAAUUGAUACUG | 71.7 | 47.7 |
| 2401 | 3982 | AGUAUCAAUUUCUUAAACC | 5318 | GGUUUAAGAAAUUGAUACU | 59.3 | 35.3 |
| 2402 | 3983 | GUAUCAAUUUCUUAAACCA | 5319 | UGGUUUAAGAAAUUGAUAC | 86.3 | 62.3 |
| 2403 | 3984 | UAUCAAUUUCUUAAACCAA | 5320 | UUGGUUUAAGAAAUUGAUA | 82.9 | 58.9 |
| 2404 | 3985 | AUCAAUUUCUUAAACCAAA | 5321 | UUUGGUUUAAGAAAUUGAU | 84.3 | 60.3 |
| 2405 | 3986 | UCAAUUUCUUAAACCAAAU | 5322 | AUUUGGUUUAAGAAAUUGA | 76.7 | 52.7 |
| 2406 | 3987 | CAAUUUCUUAAACCAAAUU | 5323 | AAUUUGGUUUAAGAAAUUG | 79.7 | 55.7 |
| 2407 | 3988 | AAUUUCUUAAACCAAAUUU | 5324 | AAAUUUGGUUUAAGAAAUU | 71.1 | 47.1 |
| 2445 | 3989 | GGGUGCUCAUCUCGUGACC | 5325 | GGUCACGAGAUGAGCACCC | 64 | 40 |
| 2446 | 3990 | GGUGCUCAUCUCGUGACCU | 5326 | AGGUCACGAGAUGAGCACC | 72.9 | 48.9 |
| 2447 | 3991 | GUGCUCAUCUCGUGACCUC | 5327 | GAGGUCACGAGAUGAGCAC | 63.8 | 39.8 |
| 2448 | 3992 | UGCUCAUCUCGUGACCUCU | 5328 | AGAGGUCACGAGAUGAGCA | 66.7 | 42.7 |
| 2449 | 3993 | GCUCAUCUCGUGACCUCUG | 5329 | CAGAGGUCACGAGAUGAGC | 71.5 | 47.5 |
| 2450 | 3994 | CUCAUCUCGUGACCUCUGC | 5330 | GCAGAGGUCACGAGAUGAG | 54.8 | 30.8 |
| 2451 | 3995 | UCAUCUCGUGACCUCUGCC | 5331 | GGCAGAGGUCACGAGAUGA | 45.1 | 21.1 |
| 2468 | 3996 | CCACCCACAUCCUUCACAA | 5332 | UUGUGAAGGAUGUGGGUGG | 86.4 | 62.4 |
| 2469 | 3997 | CACCCACAUCCUUCACAAA | 5333 | UUUGUGAAGGAUGUGGGUG | 88.7 | 64.7 |
| 2470 | 3998 | ACCCACAUCCUUCACAAAC | 5334 | GUUUGUGAAGGAUGUGGGU | 59.7 | 35.7 |
| 2471 | 3999 | CCCACAUCCUUCACAAACU | 5335 | AGUUUGUGAAGGAUGUGGG | 77.3 | 53.3 |
| 2472 | 4000 | CCACAUCCUUCACAAACUC | 5336 | GAGUUUGUGAAGGAUGUGG | 71.6 | 47.6 |
| 2473 | 4001 | CACAUCCUUCACAAACUCC | 5337 | GGAGUUUGUGAAGGAUGUG | 61.1 | 37.1 |
| 2474 | 4002 | ACAUCCUUCACAAACUCCA | 5338 | UGGAGUUUGUGAAGGAUGU | 76.9 | 52.9 |
| 2475 | 4003 | CAUCCUUCACAAACUCCAU | 5339 | AUGGAGUUUGUGAAGGAUG | 83 | 59 |
| 2476 | 4004 | AUCCUUCACAAACUCCAUG | 5340 | CAUGGAGUUUGUGAAGGAU | 57 | 33 |
| 2477 | 4005 | UCCUUCACAAACUCCAUGU | 5341 | ACAUGGAGUUUGUGAAGGA | 63.5 | 39.5 |
| 2478 | 4006 | CCUUCACAAACUCCAUGUU | 5342 | AACAUGGAGUUUGUGAAGG | 82.2 | 58.2 |
| 2479 | 4007 | CUUCACAAACUCCAUGUUU | 5343 | AAACAUGGAGUUUGUGAAG | 78.4 | 54.4 |
| 2480 | 4008 | UUCACAAACUCCAUGUUUC | 5344 | GAAACAUGGAGUUUGUGAA | 59.9 | 35.9 |
| 2481 | 4009 | UCACAAACUCCAUGUUUCA | 5345 | UGAAACAUGGAGUUUGUGA | 79.7 | 55.7 |
| 2482 | 4010 | CACAAACUCCAUGUUUCAG | 5346 | CUGAAACAUGGAGUUUGUG | 68.6 | 44.6 |
| 2483 | 4011 | ACAAACUCCAUGUUUCAGU | 5347 | ACUGAAACAUGGAGUUUGU | 66.8 | 42.8 |
| 2484 | 4012 | CAAACUCCAUGUUUCAGUG | 5348 | CACUGAAACAUGGAGUUUG | 72.7 | 48.7 |
| 2485 | 4013 | AAACUCCAUGUUUCAGUGU | 5349 | ACACUGAAACAUGGAGUUU | 68.1 | 44.1 |
| 2486 | 4014 | AACUCCAUGUUUCAGUGUU | 5350 | AACACUGAAACAUGGAGUU | 77.6 | 53.6 |
| 2487 | 4015 | ACUCCAUGUUUCAGUGUUU | 5351 | AAACACUGAAACAUGGAGU | 85.1 | 61.1 |
| 2488 | 4016 | CUCCAUGUUUCAGUGUUUG | 5352 | CAAACACUGAAACAUGGAG | 71.2 | 47.2 |
| 2489 | 4017 | UCCAUGUUUCAGUGUUUGA | 5353 | UCAAACACUGAAACAUGGA | 80.2 | 56.2 |
| 2490 | 4018 | CCAUGUUUCAGUGUUUGAG | 5354 | CUCAAACACUGAAACAUGG | 71.9 | 47.9 |
| 2491 | 4019 | CAUGUUUCAGUGUUUGAGU | 5355 | ACUCAAACACUGAAACAUG | 79.2 | 55.2 |
| 2492 | 4020 | AUGUUUCAGUGUUUGAGUC | 5356 | GACUCAAACACUGAAACAU | 65.4 | 41.4 |
| 2493 | 4021 | UGUUUCAGUGUUUGAGUCC | 5357 | GGACUCAAACACUGAAACA | 60.4 | 36.4 |
| 2494 | 4022 | GUUUCAGUGUUUGAGUCCA | 5358 | UGGACUCAAACACUGAAAC | 86.3 | 62.3 |
| 2495 | 4023 | UUUCAGUGUUUGAGUCCAU | 5359 | AUGGACUCAAACACUGAAA | 73.5 | 49.5 |
| 2496 | 4024 | UUCAGUGUUUGAGUCCAUG | 5360 | CAUGGACUCAAACACUGAA | 58.6 | 34.6 |
| 2497 | 4025 | UCAGUGUUUGAGUCCAUGU | 5361 | ACAUGGACUCAAACACUGA | 71.3 | 47.3 |
| 2498 | 4026 | CAGUGUUUGAGUCCAUGUU | 5362 | AACAUGGACUCAAACACUG | 86.7 | 62.7 |
| 2499 | 4027 | AGUGUUUGAGUCCAUGUUU | 5363 | AAACAUGGACUCAAACACU | 85.1 | 61.1 |
| 2500 | 4028 | GUGUUUGAGUCCAUGUUUA | 5364 | UAAACAUGGACUCAAACAC | 95.3 | 70.3 |
| 2501 | 4029 | UGUUUGAGUCCAUGUUUAU | 5365 | AUAAACAUGGACUCAAACA | 83 | 58 |
| 2502 | 4030 | GUUUGAGUCCAUGUUUAUU | 5366 | AAUAAACAUGGACUCAAAC | 80.4 | 55.4 |
| 2503 | 4031 | UUUGAGUCCAUGUUUAUUC | 5367 | GAAUAAACAUGGACUCAAA | 54.1 | 29.1 |
| 2504 | 4032 | UUGAGUCCAUGUUUAUUCU | 5368 | AGAAUAAACAUGGACUCAA | 68.4 | 43.4 |
| 2505 | 4033 | UGAGUCCAUGUUUAUUCUG | 5369 | CAGAAUAAACAUGGACUCA | 62.9 | 37.9 |
| 2506 | 4034 | GAGUCCAUGUUUAUUCUGC | 5370 | GCAGAAUAAACAUGGACUC | 65.5 | 40.5 |
| 2507 | 4035 | AGUCCAUGUUUAUUCUGCA | 5371 | UGCAGAAUAAACAUGGACU | 84.3 | 59.3 |
| 2508 | 4036 | GUCCAUGUUUAUUCUGCAA | 5372 | UUGCAGAAUAAACAUGGAC | 93.4 | 68.4 |
| 2509 | 4037 | UCCAUGUUUAUUCUGCAAA | 5373 | UUUGCAGAAUAAACAUGGA | 78.1 | 53.1 |
| 2510 | 4038 | CCAUGUUUAUUCUGCAAAU | 5374 | AUUUGCAGAAUAAACAUGG | 90 | 65 |
| 2511 | 4039 | CAUGUUUAUUCUGCAAAUA | 5375 | UAUUUGCAGAAUAAACAUG | 91.3 | 66.3 |
| 2512 | 4040 | AUGUUUAUUCUGCAAAUAA | 5376 | UUAUUUGCAGAAUAAACAU | 87 | 62 |
| 2513 | 4041 | UGUUUAUUCUGCAAAUAAA | 5377 | UUUAUUUGCAGAAUAAACA | 94.1 | 69.1 |
| 2514 | 4042 | GUUUAUUCUGCAAAUAAAU | 5378 | AUUUAUUUGCAGAAUAAAC | 86.6 | 61.6 |
| 2515 | 4043 | UUUAUUCUGCAAAUAAAUG | 5379 | CAUUUAUUUGCAGAAUAAA | 57.2 | 32.2 |
| 2516 | 4044 | UUAUUCUGCAAAUAAAUGG | 5380 | CCAUUUAUUUGCAGAAUAA | 51.5 | 26.5 |
| 2517 | 4045 | UAUUCUGCAAAUAAAUGGU | 5381 | ACCAUUUAUUUGCAGAAUA | 66.6 | 41.6 |
| 2518 | 4046 | AUUCUGCAAAUAAAUGGUA | 5382 | UACCAUUUAUUUGCAGAAU | 77.5 | 52.5 |
| 2519 | 4047 | UUCUGCAAAUAAAUGGUAA | 5383 | UUACCAUUUAUUUGCAGAA | 78.4 | 53.4 |
| 2520 | 4048 | UCUGCAAAUAAAUGGUAAU | 5384 | AUUACCAUUUAUUUGCAGA | 74.4 | 49.4 |
| 2521 | 4049 | CUGCAAAUAAAUGGUAAUG | 5385 | CAUUACCAUUUAUUUGCAG | 64.5 | 39.5 |
| 2522 | 4050 | UGCAAAUAAAUGGUAAUGU | 5386 | ACAUUACCAUUUAUUUGCA | 66.3 | 41.3 |
| 2523 | 4051 | GCAAAUAAAUGGUAAUGUA | 5387 | UACAUUACCAUUUAUUUGC | 98.6 | 73.6 |
| 2524 | 4052 | CAAAUAAAUGGUAAUGUAU | 5388 | AUACAUUACCAUUUAUUUG | 87.1 | 62.1 |
| 2525 | 4053 | AAAUAAAUGGUAAUGUAUU | 5389 | AAUACAUUACCAUUUAUUU | 77.4 | 52.4 |
| 2526 | 4054 | AAUAAAUGGUAAUGUAUUG | 5390 | CAAUACAUUACCAUUUAUU | 71.2 | 46.2 |
| 2527 | 4055 | AUAAAUGGUAAUGUAUUGG | 5391 | CCAAUACAUUACCAUUUAU | 52.6 | 27.6 |
| 2528 | 4056 | UAAAUGGUAAUGUAUUGGA | 5392 | UCCAAUACAUUACCAUUUA | 71 | 46 |

[0113] In Table 5, “Pos.” refers to the position of the siRNA in the GPC2 input sequence. In this case, position 1 of SEQ ID NO: 1 corresponds to position 1 of siRNA positions listed in Table 5. “Score” refers to the predicted efficacy calculated from the SDIR 19 bp model, and “Corr. Score”, or Corrected Score refers to the previous efficacy score minored by the penalties from some intrinsic target features that can influence siRNA efficacy. Each row in Table 5 includes a sense region and complementary antisense region of a duplex of a representative siRNA of the disclosure.

[0114] In some embodiments, the sense region comprises a sequence selected from the group listed in Table 5. In some embodiments, the anti-sense region comprises a sequence selected from the group listed in Table 5. In some embodiments, the sense and anti-sense regions comprise complementary sequences selected from the group listed in Table 45

[0115] In some embodiments, the siRNA comprises a linker, sometimes referred to as a loop. siRNAs comprising a linker or loop are sometimes referred to as short hairpin RNAs (shRNAs). In some embodiments, both the sense and the anti-sense regions of the siRNA are encoded by one single-stranded RNA. In these embodiments, and the anti-sense region and the sense region hybridize to form a duplex region. The sense and anti-sense regions are joined by a linker sequence, forming a “hairpin” or “stem-loop” structure. The siRNA can have complementary sense and anti-sense regions at opposing ends of a single stranded molecule, so that the molecule can form a duplex region with the complementary sequence portions, and the strands are linked at one end of the duplex region by a linker. The linker can be either a nucleotide or non-nucleotide linker. The linker can interact with the first, and optionally, second strands through covalent bonds or non-covalent interactions.

[0116] Any suitable nucleotide linker sequence is envisaged as within the scope of the disclosure. An siRNA of this disclosure may include a nucleotide, non-nucleotide, or mixed nucleotide/non-nucleotide linker that joins the sense region of the nucleic acid to the anti-sense region of the nucleic acid. A nucleotide linker can be a linker of >2 nucleotides in length, for example about 3, 4, 5, 6, 7, 8, 9, or 10 nucleotides in length.

[0117] Examples of a non-nucleotide linker include an abasic nucleotide, polyether, polyamine, polyamide, peptide, carbohydrate, lipid, polyhydrocarbon, or other polymeric agents, for example polyethylene glycols such as those having from 2 to 100 ethylene glycol units. Some examples are described in Seela et al., Nucleic Acids Research, 1987, Vol. 15, pp. 3113-3129; Cload et al., J. Am. Chem. Soc, 1991, Vol. 113, pp. 6324-6326; Jaeschke et al., Tetrahedron Lett., 1993, Vol. 34, pp. 301; Arnold et al., WO 1989/002439; Usman et al., WO 1995/006731; Dudycz et al., WO 1995/011910, and Ferentz et al., J. Am. Chem. Soc, 1991, Vol. 113, pp. 4000-4002.

[0118] Examples of nucleotide linker sequences include, but are not limited to, AUG, CCC, UUCG, CCACC, AAGCAA, CCACACC and UUCAAGAGA.

[0119] In some embodiments, the siRNA encoded by a single RNA further comprises an overhang region, as described herein.

[0120] In some embodiments, an siRNA can be a dsRNA of a length suitable as a Dicer substrate, which can be processed to produce a RISC active siRNA molecule. See, e.g., Rossi et al., US2005/0244858.

[0121] A Dicer substrate double stranded RNA (dsRNA) can be of a length sufficient that it is processed by Dicer to produce an active siRNA, and may further include one or more of the following properties: (i) the Dicer substrate dsRNA can be asymmetric, for example, having a 3′ overhang on the anti-sense strand, (ii) the Dicer substrate dsRNA can have a modified 3′ end on the sense strand to direct orientation of Dicer binding and processing of the dsRNA to an active siRNA, for example the incorporation of one or more DNA nucleotides, and (iii) the first and second strands of the Dicer substrate ds RNA can from 21-30 bp in length.

[0122] In some embodiments, the siRNA comprises at least one modified nucleotide. In some embodiments, the at least one modified nucleotide increases the stability of the RNA duplex, and siRNA.

[0123] Modifications that increase RNA stability include, but are not limited to locked nucleic acids. As used herein, the term “locked nucleic acid” or “LNA” includes, but is not limited to, a modified RNA nucleotide in which the ribose moiety comprises a methylene bridge connecting the 2′ oxygen and the 4′ carbon. This methylene bridge locks the ribose in the 3′-endo confirmation, also known as the north confirmation, that is found in A-form RNA duplexes. The term inaccessible RNA can be used interchangeably with LNA. LNAs having a 2′-4′ cyclic linkage, as described in the International Patent Application WO 99/14226, WO 00/56746, WO 00/56748, and WO 00/66604, the contents of which are incorporated herein by reference.

[0124] In some embodiments, the at least one modified nucleotide comprises a phosphorothioate derivative or an acridinine substituted nucleotide.

[0125] In some embodiments, the modified nucleotide comprises 5-fluorouracil, 5-bromouracil, 5-chlorouracil, 5-iodouracil, hypoxanthine, xanthine, 4-acetylcytosine, 5-(carboxyhydroxylmethyl) uracil, 5-carboxymethylaminomethyl-2-thiouridine, 5-carboxymethylaminomet-hyluracil, dihydrouracil, beta-D-galactosylqueosine, inosine, N6-isopentenyladenine, 1-methylguanine, 1-methylinosine, 2,2-dimethylguanine, 2-methyladenine, 2-methylguanine, 3-methylcytosine, 5-methylcytosine, N6-adenine, 7-methylguanine, 5-methyl-aminomethyluracil, 5-methoxyaminomethyl-2-thiouracil, beta-D-mannosylqueosine, 5′-methoxycarboxymethyluracil, 5-methoxyuracil, 2-methylthio-N-isopenten-yladenine, uracil-5-oxyacetic acid (v), wybutoxosine, pseudouracil, queosine, 2-thiocytosine, 5-methyl-2-thiouracil, 2-thiouracil, 4-thiouracil, 5-methyluracil, uracil-5-oxyacetic acid methylester, uracil-5-oxyacetic acid (v), 5-methyl-2-thiouracil, 3-(3-amino-3-N-2-carboxypropyl) uracil, (acp3)w, or 2,6-diaminopurine.

### Nanoparticles

[0126] The disclosure provides nanoparticles comprising dsRNAs targeting a GPC2 mRNA for degradation. In some embodiments, the dsRNA is an siRNA, as described herein.

[0127] In some embodiments, the nanoparticles comprise siRNAs targeting a GPC2 mRNA sequence, and the siRNAs comprise a sense region and anti-sense region complementary to the sense region that together form an RNA duplex, and the sense region comprises a sequence at least 70% identical to a glypican-2 (GPC2) mRNA sequence.

[0128] In some embodiments, the nanoparticle comprises a liposome, a micelle, a polymer-based nanoparticle, a lipid-polymer based nanoparticle, a metal based nanoparticle, a carbon nanotube based nanoparticle, a nanocrystal or a polymeric micelle. In some embodiments, the polymer-based nanoparticle comprises a multiblock copolymer, a diblock copolymer, a polymeric micelle or a hyperbranched macromolecule. In some embodiments, the polymer-based nanoparticle comprises a multiblock copolymer a diblock copolymer. In some embodiments, the polymer-based nanoparticle is pH responsive. In some embodiments, the polymer-based nanoparticle further comprises a buffering component.

[0129] In some embodiments, the nanoparticle comprises a liposome. Liposomes are spherical vesicles having at least one lipid bilayer, and in some embodiments, an aqueous core. In some embodiments, the lipid bilayer of the liposome may comprise phospholipids. An exemplary but non-limiting example of a phospholipid is phosphatidylcholine, but the lipid bilayer may comprise additional lipids, such as phosphatidylethanolamine. Liposomes may be multilamellar, i.e. consisting of several lamellar phase lipid bilayers, or unilamellar liposomes with a single lipid bilayer. Liposomes can be made in a particular size range that makes them viable targets for phagocytosis. Liposomes can range in size from 20 nm to 100 nm, 100 nm to 400 nm, 1 μM and larger, or 200 nm to 3 μM. Examples of lipidoids and lipid-based formulations are provided in U.S. Published Application 20090023673. In other embodiments, the one or more lipids are one or more cationic lipids. One skilled in the art will recognize which liposomes are appropriate for siRNA encapsulation.

[0130] In some embodiments, the nanoparticle comprises a micelle. A micelle is an aggregate of surfactant molecules. An exemplary micelle comprises an aggregate of amphiphilic macromolecules, polymers or copolymers in aqueous solution, wherein the hydrophilic head portions contact the surrounding solvent, while the hydrophobic tail regions are sequestered in the center of the micelle.

[0131] In some embodiments, the nanoparticle comprises a nanocrystal. Exemplary nanocrystals are crystalline particles with at least one dimension of less than 1000 nanometers, preferably of less than 100 nanometers.

[0132] In some embodiments, the nanoparticle comprises a polymer based nanoparticle. In some embodiments, the polymer comprises a multiblock copolymer, a diblock copolymer, a polymeric micelle or a hyperbranched macromolecule. In some embodiments, the particle comprises one or more cationic polymers. In some embodiments, the cationic polymer is chitosan, protamine, polylysine, polyhistidine, polyarginine or poly(ethylene)imine. In other embodiments, the one or more polymers contain the buffering component, degradable component, hydrophilic component, cleavable bond component or some combination thereof.

[0133] In some embodiments, the nanoparticles or some portion thereof are degradable. In other embodiments, the lipids and/or polymers of the nanoparticles are degradable.

[0134] In some embodiments, any of these nanoparticles can comprise a buffering component. In other embodiments, any of the nanoparticles can comprise a buffering component and a degradable component. In still other embodiments, any of the nanoparticles can comprise a buffering component and a hydrophilic component. In yet other embodiments, any of the nanoparticles can comprise a buffering component and a cleavable bond component. In yet other embodiments, any of the nanoparticles can comprise a buffering component, a degradable component and a hydrophilic component. In still other embodiments, any of the nanoparticles can comprise a buffering component, a degradable component and a cleavable bond component. In further embodiments, any of the nanoparticles can comprise a buffering component, a hydrophilic component and a cleavable bond component. In yet another embodiment, any of the nanoparticles can comprise a buffering component, a degradable component, a hydrophilic component and a cleavable bond component. In some embodiments, the particle is composed of one or more polymers that contain any of the aforementioned combinations of components.

[0135] In further embodiments, the GPC2 targeting siRNA or dsRNA is conjugated to, complexed to, or encapsulated by the one or more lipids or polymers of the nanoparticle. GPC2 targeting dsRNAs or siRNAs can be encapsulated in the hollow core of a nanoparticle. Alternatively, or in addition, GPC2 targeting dsRNAs or siRNAs can be incorporated into the lipid or polymer based shell of the nanoparticle, for example via intercalation. Alternatively, or in addition, GPC2 targeting dsRNAs or siRNAs can be attached to the surface of the nanoparticle. In some embodiments, the GPC2 targeting siRNA or dsRNA is conjugated to one or more lipids or polymers of the nanoparticle, e.g. via covalent attachment.

[0136] In some embodiments, the nanoparticle further comprises a targeting agent. In some embodiments, the targeting agent comprises a peptide ligand, a nucleotide ligand, a polysaccharide ligand, a fatty acid ligand, a lipid ligand, a small molecule ligand, an antibody, an antibody fragment, an antibody mimetic or an antibody mimetic fragment. In some embodiments, the polysaccharide ligand is hyaluronic acid (HA). In some embodiments, the targeting agent binds to the surface of a cell of the cancer of the subject. In some embodiments, the targeting agent is on the surface and/or within the nanoparticle.

[0137] In some embodiments, the targeting agent comprises hyaluronic acid (HA). HA binds to CD44, a transmembrane peptidoglycan expressed on the surface of many types of cancer cells. CD44 integrates cellular environmental cues with growth factors and cytokine signals, and plays a role in the progression of many cancers. Targeting of CD44+ cells by HA nanoparticles thus provides superior delivery and specificity of the compositions of the disclosure to cancer cells.

[0138] In some embodiments, the nanoparticle further comprises a blending polymer. In some embodiments, the blending polymer is a copolymer comprising a degradable component and hydrophilic component. In some embodiments, the degradable component of the blending polymer is a polyester, poly(ortho ester), poly(ethylene imine), poly(caprolactone), polyanhydride, poly(acrylic acid), polyglycolide or poly(urethane). In some embodiments, the degradable component of the blending polymer is poly(lactic acid) (PLA) or poly(lactic-co-glycolic acid) (PLGA). In some embodiments, the hydrophilic component of the blending polymer is a polyalkylene glycol or a polyalkylene oxide. In some embodiments, the polyalkylene glycol is polyethylene glycol (PEG). In other embodiments, the polyalkylene oxide is polyethylene oxide (PEO).

[0139] In some embodiments, the nanoparticle is a polymer based nanoparticle. Polymer based nanoparticles comprise one or more polymers. In some embodiments, the one or more polymers comprise a polyester, poly(ortho ester), poly(ethylene imine), poly(caprolactone), polyanhydride, poly(acrylic acid), polyglycolide or poly(urethane). In still other embodiments, the one or more polymers comprise poly(lactic acid) (PLA) or poly(lactic-co-glycolic acid) (PLGA). In some embodiments, the one or more polymers comprise poly(lactic-co-glycolic acid) (PLGA). In some embodiments, the one or more polymers comprise poly(lactic acid) (PLA). In some embodiments, the one or more polymers comprise polyalkylene glycol or a polyalkylene oxide. In some embodiments, the polyalkylene glycol is polyethylene glycol (PEG) or the polyalkylene oxide is polyethylene oxide (PEO).

[0140] In some embodiments, the nanoparticle comprising the GPC2 siRNA is a polymer based nanoparticle. In some embodiments, the polymer-based nanoparticle comprises poly(lactic-co-glycolic acid) PLGA polymers. In some embodiments, the PLGA nanoparticle further comprises a targeting agent, such as HA.

[0141] In some embodiments, the nanoparticle has an average characteristic dimension of less than about 500 nm, 400 nm, 300 nm, 250 nm, 200 nm, 180 nm, 150 nm, 120 nm, 100 nm, 90 nm, 80 nm, 70 nm, 60 nm, 50 nm, 40 nm, 30 nm or 20 nm. In other embodiments, the nanoparticle has an average characteristic dimension of 10 nm, 20 nm, 30 nm, 40 nm, 50 nm, 60 nm, 70 nm, 80 nm, 90 nm, 100 nm, 120 nm, 150 nm, 180 nm, 200 nm, 250 nm or 300 nm. In further embodiments, the nanoparticle has an average characteristic dimension of 10-500 nm, 10-400 nm, 10-300 nm, 10-250 nm, 10-200 nm, 10-150 nm, 10-100 nm, 10-75 nm, 10-50 nm, 50-500 nm, 50-400 nm, 50-300 nm, 50-200 nm, 50-150 nm, 50-100 nm, 50-75 nm, 100-500 nm, 100-400 nm, 100-300 nm, 100-250 nm, 100-200 nm, 100-150 nm, 150-500 nm, 150-400 nm, 150-300 nm, 150-250 nm, 150-200 nm, 200-500 nm, 200-400 nm, 200-300 nm, 200-250 nm, 200-500 nm, 200-400 nm or 200-300 nm.

[0142] In some embodiments, for example those embodiments where nanoparticles comprising GPC2-targeting siRNAs are administered with one or more additional cancer therapies, the nanoparticle can comprise at least one siRNA targeting GPC2 and one or more therapeutic or chemotherapeutic agents. For example, the nanoparticle comprises at least one siRNA targeting GPC2 and a platinum based antineoplastic agent, or a DNA alkylating agent, or a DNA intercalating agent, or a topoisomerase inhibitor.

[0143] Chemotherapeutic agents that can be incorporated into the nanoparticles described herein include, but are not limited to, Cisplatin, Carboplatin, Doxorubicin, Cyclophosphamide, Etoposide, and Topotecan.

### Therapeutic Agents

[0144] Provided herein are therapeutic agents, such as chemotherapeutic agents, which can be administered with the nanoparticles comprising siRNAs targeting GPC2 described herein.

[0145] In some embodiments, the additional therapeutic agent is incorporated into a nanoparticle comprising at least one siRNA targeting GPC2. In some embodiments, the additional therapeutic agent is conjugated to, complexed to, or encapsulated by the one or more lipids or polymers of the nanoparticle. Additional therapeutic agents can be encapsulated in the hollow core of a nanoparticle. Alternatively, or in addition, Additional therapeutic agents can be incorporated into the lipid or polymer based shell of the nanoparticle, for example via intercalation. Alternatively, or in addition, additional therapeutic agents can be attached to the surface of the nanoparticle. In some embodiments, the additional therapeutic agents are conjugated to one or more lipids or polymers of the nanoparticle, e.g. via covalent attachment.

[0146] In some embodiments, the additional therapeutic agent and the nanoparticles comprising siRNAs targeting GPC2 are formulated in the same composition. For example the nanoparticles comprising siRNAs targeting GPC2 and the additional therapeutic agent can be formulated in the same pharmaceutical composition.

[0147] In some embodiments, the additional therapeutic agent and the nanoparticles comprising siRNAs targeting GPC2 are formulated as separate compositions, e.g. for separate administration to a subject.

[0148] In some embodiments, the additional therapeutic agent is a chemotherapeutic agent. In some embodiments, the chemotherapeutic agent comprises a platinum based antineoplastic agent, a DNA alkylating agent, a DNA intercalating agent, or a topoisomerase inhibitor.

[0149] In some embodiments, the chemotherapeutic agent may comprise platinum based antineoplastic drug (platins). One mechanism of action by which platins work is through the crosslinking of DNA, which inhibits DNA repair, DNA synthesis, or both in cancer cells. Exemplary, but not limiting platins comprise Cisplatin or Carboplatin, and analogs or derivatives thereof.

[0150] In some embodiments, the chemotherapeutic agent may comprise a Topoisomerase I inhibitor or Topoisomerase II. Topoisomerase I and II are enzymes which regulates DNA structure by breaking and rejoining the phosphodiester backbone of the DNA during the cell cycle (e.g., during DNA synthesis). Without functional Topoisomerase I or II, single and double strand breaks accumulate, leading to cell death. Exemplary but not limiting Topoisomerase I inhibitors comprise Irinotecan, Topotecan, and analogs or derivatives thereof. Exemplary but not limiting Topoisomerase II inhibitors comprise Etoposide and analogs or derivatives thereof.

[0151] In some embodiments, the chemotherapeutic agent may comprise a DNA alkylating agent. DNA alkylating agents attach an alkyl group to DNA, typically to the guanine base of the DNA. This causes DNA damage, and may kill the cancer cells or stop them from dividing. In some embodiments, the DNA alkylating agent comprises Dacarbazine, Temozolomide, Cyclophosphamide or Ifosfamide and analogs or derivatives thereof.

[0152] In some embodiments, the chemotherapeutic agent may comprise a DNA intercalating agent. DNA intercalating agents insert themselves into the structure of the DNA within a cell and bind to the DNA, causing DNA damage. This may kill cancer cells, or stop them from dividing. Exemplary but not limiting DNA intercalating agents comprise Doxorubicin and analogs or derivatives thereof.

[0153] In some embodiments, the chemotherapeutic agent may comprise a taxane. Taxanes are a class of diterpenes that have long been used in cancer treatment. Taxanes act by disrupting microtubule function, which in turn disrupts cell division. Typically, taxanes act by stabilizing GDP bound tubulin in the microtubule, disrupting microtubule depolymerization and dynamic instability of microtubules. Exemplary taxanes comprise Paclitaxel or Docetaxel, and analogs or derivatives thereof.

[0154] In some embodiments, the chemotherapeutic agent may comprise a Vinca alkaloid. Like taxanes, Vinca alkaloids also act upon tubulin. Vinca alkaloids prevent microtubule polymerization, thus preventing cell division. Exemplary but not limiting Vinca alkaloids comprise Vinblastine, Vincristine, Vinorelbine, Vincaminol, Vineridine, Vinburnine, Vindesine, Vincamine and analogs or derivatives thereof.

[0155] In some embodiments, the chemotherapeutic agent may comprise a thymidylate synthase inhibitor. Thymidylate synthase is a key enzyme involved in DNA synthesis. Exemplary but not limiting thymidylate synthase inhibitors comprise 5-Fluorouracil and analogs or derivatives thereof.

[0156] Additional chemotherapeutic agents that cause DNA damage, such as through the binding of DNA or interfering with DNA synthesis, are also considered as within the scope of the invention.

### Pharmaceutical Compositions

[0157] Provided herein are pharmaceutical compositions comprising nanoparticles, the nanoparticles comprising dsRNAs targeting GPC2 as described herein.

[0158] Provided herein are pharmaceutical compositions comprising the nanoparticles comprising siRNAs targeting GPC2 as described herein.

[0159] The pharmaceutical compositions of the disclosure can optionally comprise therapeutic agents, pharmaceutical agents, carriers, adjuvants, dispersing agents, diluents, and the like.

[0160] In some embodiments, the pharmaceutical composition comprises a therapeutic agent, such as a chemotherapeutic agent. In some embodiments, the therapeutic agent is formulated in the same nanoparticle as the dsRNA or siRNA targeting GPC2.

[0161] In some embodiments, the therapeutic agent is not formulated in the nanoparticle comprising the dsRNA or siRNA targeting GPC2, but both the nanoparticle and the therapeutic agent are formulated in the same pharmaceutical composition. In some embodiments, the therapeutic agent is not formulated in the nanoparticle comprising the dsRNA or siRNA targeting GPC2, and the nanoparticle and therapeutic agent are formulated in separate pharmaceutical compositions.

[0162] Pharmaceutical compositions can contain any of the reagents discussed above, and one or more of a pharmaceutically acceptable carrier, a diluent or an excipient.

[0163] A “pharmaceutical composition” is a formulation comprising the nanoparticles described herein, in a form suitable for administration to a subject. In one embodiment, the pharmaceutical composition is in bulk or in unit dosage form. The unit dosage form is any of a variety of forms, including, for example, a capsule, an IV bag, a tablet, a single pump on an aerosol inhaler or a vial. The quantity of active ingredient (e.g., a formulation of the disclosed agent) in a unit dose of composition is an effective amount and is varied according to the particular treatment involved. One skilled in the art will appreciate that it is sometimes necessary to make routine variations to the dosage depending on the age and condition of the patient. The dosage will also depend on the route of administration. A variety of routes are contemplated, including oral, pulmonary, rectal, parenteral, transdermal, subcutaneous, intravenous, intramuscular, intraperitoneal, inhalational, buccal, sublingual, intrapleural, intrathecal, intranasal, and the like. Dosage forms for the topical or transdermal administration of a of this invention include powders, sprays, ointments, pastes, creams, lotions, gels, solutions, patches and inhalants. In one embodiment, the active agent is mixed under sterile conditions with a pharmaceutically acceptable carrier, and with any preservatives, buffers, or propellants that are required.

[0164] As used herein, the phrase “pharmaceutically acceptable” refers to those compounds, anions, cations, materials, compositions, carriers, and/or dosage forms which are, within the scope of sound medical judgment, suitable for use in contact with the tissues of human beings and animals without excessive toxicity, irritation, allergic response, or other problem or complication, commensurate with a reasonable benefit/risk ratio.

[0165] “Pharmaceutically acceptable excipient” means an excipient that is useful in preparing a pharmaceutical composition that is generally safe, non-toxic and neither biologically nor otherwise undesirable, and includes excipient that is acceptable for veterinary use as well as human pharmaceutical use. A “pharmaceutically acceptable excipient” as used in the specification and claims includes both one and more than one such excipient.

[0166] A pharmaceutical composition of the invention is formulated to be compatible with its intended route of administration. Examples of routes of administration include parenteral, e.g., intravenous, intradermal, subcutaneous, oral (e.g., inhalation), transdermal (topical), intraperitoneal (into the body cavity) and transmucosal administration. Solutions or suspensions used for parenteral, intradermal, intraperitoneal or subcutaneous application can include the following components: a sterile diluent such as water for injection, saline solution, fixed oils, polyethylene glycols, glycerine, propylene glycol or other synthetic solvents; antibacterial agents such as benzyl alcohol or methyl parabens; antioxidants such as ascorbic acid or sodium bisulfite; chelating agents such as ethylenediaminetetraacetic acid; buffers such as acetates, citrates or phosphates, and agents for the adjustment of tonicity such as sodium chloride or dextrose. The pH can be adjusted with acids or bases, such as hydrochloric acid or sodium hydroxide. The parenteral preparation can be enclosed in ampoules, disposable syringes or multiple dose vials made of glass or plastic. These preparations can contain antioxidants, buffers, bacteriostats and solutes which render the formulation isotonic with the blood of the intended recipient. Aqueous and non-aqueous sterile suspensions can include suspending agents and thickening agents. The formulations can be presented in unit/dose or multi-dose containers, for example sealed ampoules and vials, and can be stored in a freeze-dried (lyophilized) condition requiring only the addition of the sterile liquid carrier, for example, saline or water-for-injection immediately prior to use.

[0167] The pharmaceutical compositions containing the nanoparticles described herein may be manufactured in a manner that is generally known, e.g., by means of conventional mixing, dissolving, granulating, dragee-making, levigating, emulsifying, encapsulating, entrapping, or lyophilizing processes. Pharmaceutical compositions may be formulated in a conventional manner using one or more pharmaceutically acceptable carriers comprising excipients and/or auxiliaries that facilitate processing of the active agents into preparations that can be used pharmaceutically. Of course, the appropriate formulation is dependent upon the route of administration chosen.

[0168] Pharmaceutical compositions suitable for injectable use include sterile aqueous solutions (where water soluble) or dispersions and sterile powders for the extemporaneous preparation of sterile injectable solutions or dispersion. For intravenous administration, suitable carriers include physiological saline, bacteriostatic water, Cremophor EL™ (BASF, Parsippany, N.J.) or phosphate buffered saline (PBS). In all cases, the composition must be sterile and should be fluid to the extent that easy syringeability exists. It must be stable under the conditions of manufacture and storage and must be preserved against the contaminating action of microorganisms such as bacteria and fungi. The carrier can be a solvent or dispersion medium containing, for example, water, ethanol, polyol (for example, glycerol, propylene glycol, and liquid polyethylene glycol, and the like), and suitable mixtures thereof. The proper fluidity can be maintained, for example, by the use of a coating such as lecithin, by the maintenance of the required nanoparticle size in the case of dispersion and by the use of surfactants. Prevention of the action of microorganisms can be achieved by various antibacterial and antifungal agents, for example, parabens, chlorobutanol, phenol, ascorbic acid, thimerosal, and the like. In many cases, it will be preferable to include isotonic agents, for example, sugars, polyalcohols such as manitol and sorbitol, and sodium chloride in the composition. Prolonged absorption of the injectable compositions can be brought about by including in the composition an agent which delays absorption, for example, aluminum monostearate and gelatin.

[0169] Oral compositions generally include an inert diluent or an edible pharmaceutically acceptable carrier. They can be enclosed in gelatin capsules or compressed into tablets. For the purpose of oral therapeutic administration, the active age can be incorporated with excipients and used in the form of tablets, troches, or capsules. Oral compositions can also be prepared using a fluid carrier for use as a mouthwash, wherein the agents in the fluid carrier is applied orally and swished and expectorated or swallowed. Pharmaceutically compatible binding agents, and/or adjuvant materials can be included as part of the composition. The tablets, pills, capsules, troches and the like can contain any of the following ingredients, or agents of a similar nature: a binder such as microcrystalline cellulose, gum tragacanth or gelatin; an excipient such as starch or lactose, a disintegrating agent such as alginic acid, Primogel, or corn starch; a lubricant such as magnesium stearate or Sterotes; a glidant such as colloidal silicon dioxide; a sweetening agent such as sucrose or saccharin; or a flavoring agent such as peppermint, methyl salicylate, or orange flavoring.

[0170] For administration by inhalation, the agents are delivered in the form of an aerosol spray from pressured container or dispenser, which contains a suitable propellant, e.g., a gas such as carbon dioxide, or a nebulizer.

[0171] The nanoparticles comprising dsRNAs or siRNAs can be prepared with pharmaceutically acceptable carriers that will protect the dsRNAs or siRNAs against rapid elimination from the body, such as a controlled release formulation, including implants and microencapsulated delivery systems. Biodegradable, biocompatible polymers can be used, such as ethylene vinyl acetate, polyanhydrides, polyglycolic acid, collagen, polyorthoesters, and polylactic acid. Methods for preparation of such formulations will be apparent to those skilled in the art, and the materials can be obtained commercially. Liposomal suspensions (including liposomes targeted to infected cells with monoclonal antibodies to viral antigens) can also be used as pharmaceutically acceptable carriers. These can be prepared according to methods known to those skilled in the art, for example, as described in U.S. Pat. No. 4,522,811.

[0172] It is especially advantageous to formulate oral or parenteral compositions in dosage unit form for ease of administration and uniformity of dosage. Dosage unit form as used herein refers to physically discrete units suited as unitary dosages for the subject to be treated; each unit containing a predetermined quantity of active agent calculated to produce the desired therapeutic effect in association with the required pharmaceutical carrier. The specification for the dosage unit forms of the invention are dictated by and directly dependent on the unique characteristics of the active agent and the particular therapeutic effect to be achieved.

[0173] The pharmaceutical compositions can be included in a container, pack, or dispenser together with instructions for administration.

[0174] As used herein, “pharmaceutically acceptable salts” refer to derivatives of the compounds of the present invention wherein the parent compound is modified by making acid or base salts thereof. Examples of pharmaceutically acceptable salts include, but are not limited to, mineral or organic acid salts of basic residues such as amines, alkali or organic salts of acidic residues such as carboxylic acids, and the like. The pharmaceutically acceptable salts include the conventional non-toxic salts or the quaternary ammonium salts of the parent compound formed, for example, from non-toxic inorganic or organic acids.

[0175] Techniques for formulation and administration of the disclosed compositions of the invention can be found in Remington: the Science and Practice of Pharmacy, 19th edition, Mack Publishing Co., Easton, Pa. (1995).

[0176] All percentages and ratios used herein, unless otherwise indicated, are by weight. Other features and advantages of the present invention are apparent from the different examples. The provided examples illustrate different components and methodology useful in practicing the present invention. The examples do not limit the claimed invention. Based on the present disclosure the skilled artisan can identify and employ other components and methodology useful for practicing the present invention.

### Nucleic Acids and Vectors

[0177] The disclosure provides nucleic acids comprising the sequences encoding the dsRNAs or siRNAs targeting GPC2 described herein.

[0178] In some embodiments, the nucleic acids are ribonucleic acids (RNAs).

[0179] In some embodiments, the nucleic acids are deoxyribonucleic acids (DNAs). The DNAs may be a vector or a plasmid, e.g., an expression vector.

[0180] A “vector” is any nucleic acid molecule for the cloning of and/or transfer of a nucleic acid into a cell. A vector may be a replicon to which another nucleotide sequence may be attached to allow for replication of the attached nucleotide sequence. A “replicon” can be any genetic element (e.g., plasmid, phage, cosmid, chromosome, viral genome) that functions as an autonomous unit of nucleic acid replication in vivo, i.e., capable of replication under its own control. The term “vector” includes both viral and nonviral (e.g., plasmid) nucleic acid molecules for introducing a nucleic acid into a cell in vitro, ex vivo, and/or in vivo. A large number of vectors known in the art may be used to manipulate nucleic acids, incorporate response elements and promoters into genes, etc. For example, the insertion of the nucleic acid fragments corresponding to response elements and promoters into a suitable vector can be accomplished by ligating the appropriate nucleic acid fragments into a chosen vector that has complementary cohesive termini. Alternatively, the ends of the nucleic acid molecules may be enzymatically modified or any site may be produced by ligating nucleotide sequences (linkers) to the nucleic acid termini Such vectors may be engineered to contain sequences encoding selectable markers that provide for the selection of cells that contain the vector and/or have incorporated the nucleic acid of the vector into the cellular genome. Such markers allow identification and/or selection of host cells that incorporate and express the proteins encoded by the marker. A “recombinant” vector refers to a viral or non-viral vector that comprises one or more heterologous nucleotide sequences (i.e., transgenes), e.g., two, three, four, five or more heterologous nucleotide sequences.

[0181] By the term “express” or “expression” of a polynucleotide coding sequence, it is meant that the sequence is transcribed, and optionally, translated. Typically, according to the present invention, expression of a coding sequence of the invention will result in production of the polypeptide of the invention. The entire expressed polypeptide or fragment can also function in intact cells without purification.

[0182] In some embodiments, the vector is an expression vector for manufacturing siRNAs of the disclosure. Exemplary expression vectors may comprise a sequence encoding the sense and/or anti-sense strand of the siRNA under the control of a suitable promoter for transcription. Interfering RNAs may be expressed from a variety of eukaryotic promoters known to those of ordinary skill in the art, including pol III promoters, such as the U6 or H1 promoters, or pol II promoters, such as the cytomegalovirus promoter. Those of skill in the art will recognize that these promoters can also be adapted to allow inducible expression of the interfering RNA.

[0183] dsRNAs and siRNAs can be expressed endogenously from plasmid or viral expression vectors, or from minimal expression cassettes, for example, PCR generated fragments comprising one or more promoters and an appropriate template or templates for transcribing the siRNA. Examples of commercially available plasmid-based expression vectors for shRNA include members of the pSilencer series (Ambion, Austin. Tex.) and pCpG-siRNA (InvivoGen. San Diego, Calif.). Examples of kits for production of PCR-generated shRNA expression cassettes include Silencer Express (Ambion, Austin, Tex.) and siXpress (Minis, Madison. Wis.).

[0184] Viral vectors for the in vivo expression of siRNAs and dsRNAs in eukaryotic cells are also contemplated as within the scope of the instant disclosure. Viral vectors may be derived from a variety of viruses including adenovirus, adeno-associated virus, lentivirus (e.g., HIV, FIV, and EIAV), and herpes virus. Examples of commercially available viral vectors for shRNA expression include pSilencer adeno (Ambion, Austin, Tex.) and pLenti6/BLOCK-iT™-DEST (Invitrogen, Carlsbad, Calif.). Selection of viral vectors, methods for expressing the siRNA from the vector and methods of delivering the viral vector, for example incorporated within a nanoparticle, are within the ordinary skill of one in the art.

[0185] It will be apparent to those skilled in the art that any suitable vector, optionally incorporated into a nanoparticle, can be used to deliver the dsRNAs or siRNAs described herein to a cell or subject. The vector can be delivered to cells in vivo. In other embodiments, the vector can be delivered to cells ex vivo, and then cells containing the vector are delivered to the subject. The choice of delivery vector can be made based on a number of factors known in the art, including age and species of the target host, in vitro versus in vivo delivery, level and persistence of expression desired, intended purpose (e.g., for therapy or screening), the target cell or organ, route of delivery, size of the isolated polynucleotide, safety concerns, and the like.

Methods of Making dsRNAs

[0186] Provided herein are methods of making dsRNAs or siRNAs targeting GPC2, and nanoparticles comprising same.

[0187] siRNAs may be generated exogenously by chemical synthesis, by in vitro transcription, or by cleavage of longer double-stranded RNA with Dicer or another appropriate nuclease with similar activity. Chemically synthesized siRNAs, produced from protected ribonucleoside phosphoramidites using a conventional DNA/RNA synthesizer, may be obtained from commercial suppliers such as Millipore Sigma (Houston, Tex.), Ambion Inc. (Austin, Tex.). Invitrogen (Carlsbad, Calif.), or Dharmacon (Lafayette, Colo.). siRNAs can be purified by extraction with a solvent or resin, precipitation, electrophoresis, chromatography, or a combination thereof, for example. Alternatively, siRNAs may be used with little if any purification to avoid losses due to sample processing.

[0188] In alternative embodiments, dsRNAs and siRNAs can be produced using an expression vector into which a nucleic acid encoding the double stranded RNA has been cloned, for example under control of a suitable promoter.

[0189] In some embodiments, dsRNAs or siRNAs can be incorporated in a nanoparticle.

[0190] Nanoparticles comprising dsRNAs or siRNAs of the disclosure can be prepared by any suitable means known in the art. For example, polymeric nanoparticles can be prepared using various methods including, but not limited to, solvent evaporation, spontaneous emulsification, solvent diffusion, desolvation, dialysis, ionic gelation, nanoprecipitation, salting out, spray drying and supercritical fluid methods. The dispersion of preformed polymers and the polymerization of monomers are two additional strategies for preparation of polymeric nanoparticles. However, the choice of an appropriate method depends upon various factors, which will be known to the person of ordinary skill in the art.

[0191] Sterile injectable solutions comprising a nanoparticle of the disclosure can be prepared by incorporating the GPC2-targeting siRNA in the nanoparticles in the required amount in an appropriate solvent with one or a combination of ingredients enumerated herein, as required, followed by filtered sterilization. Alternatively, or in addition, sterilization can be achieved through other means such as radiation or gas. Generally, dispersions are prepared by incorporating the nanoparticles into a sterile vehicle that contains a basic dispersion medium and the required other ingredients from those enumerated above. In the case of sterile powders for the preparation of sterile injectable solutions, methods of preparation are vacuum drying and freeze drying that yields a powder of GPC2 siRNA nanoparticles plus any additional desired ingredient from a previously sterile filtered solution thereof.

### Inhibition of GPC2 Expression

[0192] Provided herein are methods of reducing or inhibiting GPC2 expression or activity in a cell, comprising contacting the cell with an siRNA targeting GPC2 as described herein. siRNAs of the disclosure that target GPC2 can reduce or inhibit GPC2 activity through the RNAi pathway. The cell can be in vitro, in vivo or ex vivo. For example, the cell can be from a cell line, or in vivo in a cancer patient.

[0193] In some embodiments, siRNAs of the disclosure are capable of inducing RNAi-mediated degradation of a GPC2 mRNA in a cancer cell of a subject.

[0194] In some embodiments, administration of nanoparticles comprising siRNAs targeting GPC2 or pharmaceutical compositions comprising same decreases viability of a cell of the cancer.

[0195] In some embodiments, administration of nanoparticles comprising siRNAs targeting GPC2 or pharmaceutical compositions comprising same increases apoptosis of cells.

[0196] As used herein, the terms “contacting,” “introducing” and “administering” are used interchangeably, and refer to a process by which dsRNA or siRNA of the present disclosure or a nucleic acid molecule encoding a dsRNA or siRNA of this disclosure is delivered to a cell, in order to inhibit or alter or modify expression of a target gene. The dsRNA may be administered in a number of ways, including, but not limited to, direct introduction into a cell (i.e., intracellularly) and/or extracellular introduction into a cavity, interstitial space, or into the circulation of the organism.

[0197] “Introducing” in the context of a cell or organism means presenting the nucleic acid molecule to the organism and/or cell in such a manner that the nucleic acid molecule gains access to the interior of a cell. Where more than one nucleic acid molecule is to be introduced these nucleic acid molecules can be assembled as part of a single polynucleotide or nucleic acid construct, or as separate polynucleotide or nucleic acid constructs, and can be located on the same or different nucleic acid constructs. Accordingly, these polynucleotides can be introduced into cells in a single transformation event or in separate transformation events. Thus, the term “transformation” as used herein refers to the introduction of a heterologous nucleic acid into a cell. Transformation of a cell may be stable or transient.

[0198] The term “inhibit” or “reduce” or grammatical variations thereof, as used herein, refer to a decrease or diminishment in the specified level or activity of at least about 5%, about 10%, about 15%, about 25%, about 35%, about 40%, about 50%, about 60%, about 75%, about 80%, about 90%, about 95% or more. In some embodiments, the inhibition or reduction results in little or essentially no detectible activity (at most, an insignificant amount, e.g., less than about 10% or even 5%).

[0199] In contrast, the term “increase” or grammatical variations thereof as used herein refers to an increase or elevation in the specified level or activity of at least about 5%, about 10%, about 15%, about 25%, about 35%, about 40%, about 50%, about 60%, about 75%, about 80%, about 90%, about 95% or more. Increases in activity can be described in terms of fold change. For example, activity can be increased 1.2×, 1.5×, 2×, 3×, 5×, 6×, 7×, 8×, 9×, 10× or more compared to a baseline level of activity.

[0200] As used herein, the term “IC50” or “IC₅₀ value” refers to the concentration of an agent where cell viability is reduced by half. The IC₅₀ is thus a measure of the effectiveness of an agent in inhibiting a biological process. In an exemplary model, cancerous cell lines are cultured using standard techniques, treated with a GPC2 siRNA and the IC₅₀ value of the GPC2 siRNA is calculated after 24, 48 and/or 72 hours to determine its effectiveness in killing the cancer cells or inhibiting cell growth.

[0201] Methods of monitoring of GPC2 mRNA and/or protein expression can be used to characterize gene silencing, and to determine the effectiveness of the compositions described herein. Expression of GPC2 may be evaluated by any known technique. Examples thereof include immunoprecipitations methods, utilizing GPC2 antibodies in assays such as ELISAs, Western Blot, or immunohistochemistry to visualize GPC2 protein expression in cells, or flow cytometry. Additional methods include various hybridization methods utilizing a nucleic acid that specifically hybridizes with a nucleic acid encoding GPC2 or a unique fragment thereof, or a transcription product (e.g., mRNA) or splicing product of said nucleic acid, Northern Blot methods, Southern blot methods, and various PCR-based methods such as RT-PCR, qPCR or digital droplet PCR. GPC2 mRNA expression may additionally be assessed using high throughput sequencing techniques. Using high throughput sequencing of RNA libraries, the level of GPC2 mRNA from a sample of cells can be calculated from the number of reads that map to a GPC2 reference sequence using techniques known in the art. GPC2 expression can be assayed in cultured cells, spheroid bodies, patient derived xenograft cancer models, or patient samples.

[0202] Methods of assaying the effect of individual dsRNAs or siRNAs on tumor cells include transfecting representative cell lines with dsRNAs or siRNAs targeting GPC2, and measuring viability. For example, cells from representative cell lines can be transfected using methods known in the art, such as the RNAiMAX Lipofectamine kit (Invitrogen, Carlsbad, Calif.), and cultured using any suitable technique known in the art. Optionally additional therapeutic agents as described herein can be added at variable concentrations to cell culture media following transfection. Following a suitable incubation period, such as 24-96 hours, cell viability can be measured using methods such as Cell Titer Glo 2.0 (Promega, CA) to determine cell viability, and/or GPC2 mRNA and protein levels can be assessed using the methods described herein.

### Treatment of Cancer

[0203] Provided herein are methods of treating a cancer in a subject, comprising administering to the subject a therapeutically effective amount of a nanoparticle comprising a dsRNA or siRNA targeting GPC2. In some embodiments, the methods comprise administering a chemotherapeutic agent to the subject. The chemotherapeutic agent can be formulated in the nanoparticles, in the same pharmaceutical composition as the nanoparticles, or in a separate composition. In some embodiments, the chemotherapeutic agent comprises a platinum based antineoplastic agent, a DNA alkylating agent, a DNA intercalating agent, or a topoisomerase inhibitor as described herein.

[0204] In some embodiments, the methods comprise administering to the subject a therapeutically effective amount of a composition comprising a nanoparticle, the nanoparticle comprising a small interfering RNA (siRNA), wherein the siRNA comprises a sense region and anti-sense region complementary to the sense region that together form an RNA duplex, wherein the sense region comprises a sequence at least 70% identical to a glypican-2 (GPC2) mRNA sequence of SEQ ID NO: 1 or SEQ ID NO: 2.

[0205] Suitable subjects include mammals. The term “mammal” as used herein includes, but is not limited to, humans, bovines, ovines, caprines, equines, felines, canines, lagomorphs, etc. Human subjects include neonates, infants, juveniles, and adults. In some embodiments, the subject is an animal model of cancer, for example a mouse or a rat model of cancer. In certain embodiments, the subject has or is at risk for cancer.

[0206] In some embodiments, the cancer is a cancer that expresses GPC2 on the cells of the cancer.

[0207] In some embodiments, the cancer is selected from the group consisting of astrocytoma, breast cancer, colorectal cancer, Ewing's sarcoma, gastric cancer, leiomyosarcoma, liver cancer, lung cancer, mesothelioma, ovarian cancer, pancreatic cancer, renal cancer, rhabdomyosarcoma and neuroblastoma.

[0208] In some embodiments, the cancer is astrocytoma. Astrocytomas are a type of cancer of the brain. Astrocytomas originate from a type of glial cells, star-shaped brain cells in the cerebrum called astrocytes. This type of tumor does not usually spread outside the brain and spinal cord.

[0209] In some embodiments, the cancer is breast cancer. Breast cancers are cancers that arise from cells in the breast. Breast cancers can occur in both men and women. Exemplary types of breast cancer include ductal carcinoma in situ, invasive breast cancers such as invasive ductal carcinoma and invasive lobular carcinoma, and inflammatory breast cancer.

[0210] In some embodiments, the cancer is colorectal cancer. Colorectal cancers comprise cancers of the colon or rectum. The rectum is the passageway that connects the colon to the anus. In certain embodiments, the colorectal cancer comprises a colorectal carcinoma.

[0211] In some embodiments, the cancer is Ewing's sarcoma. Ewing's sarcoma comprises tumors of the bones, the soft tissue surrounding bones such as cartilage and nerves, or a combination thereof. Ewing's sarcoma typically affects children and young adults, although it can occur at any age. Ewing's sarcoma can occur in any bone. In some more frequent embodiments, Ewing's sarcoma begins in the leg bones, hipbones, arm bones, and bones in the chest, skull or spine. In some less common embodiments, Ewing's sarcoma occurs in the soft tissues of the arms, legs, abdomen, chest, neck, head or a combination thereof. In some embodiments of Ewing's sarcoma, there is no bone involvement. In some embodiments, treatments for Ewing's sarcoma comprise chemotherapy, surgery, or a combination thereof. In some embodiments, Ewing's sarcoma is associated with a chromosomal translocations affecting the EWSR1 (EWS RNA binding protein 1), FLI1 (Fli-1 proto-oncogene), ERG (ERG, ETS transcription factor) and ETV1 (ETS variant 1) genes.

[0212] In some embodiments, the cancer is gastric cancer. Gastric cancers comprise cancers which form from the cells of the lining of the stomach. In some embodiments, the gastric cancer comprises a gastrointestinal stromal cell tumor (GIST), a lymphoma, a carcinoid tumor, a squamous cell carcinoma, a small cell carcinoma or a leiomyosarcoma. GISTs may be malignant or benign. GISTs are most commonly found in the stomach and small intestine, but may be found anywhere in in or near the gastrointestinal tract. In some embodiments, a GIST may arise from the interstitial cells of Cajal. A lymphoma is a cancer of the lymph nodes and lymphatic system. A gastric lymphoma may be a primary lymphoma (i.e., a lymphoma that originates in the stomach itself), or a secondary lymphoma that originated elsewhere and metastasized to the stomach. Gastric squamous cell carcinomas are extremely rare. Squamous cell carcinomas arise from abnormal squamous cells, which are cells in the upper layer of the skin. Small cell carcinomas are a highly malignant type of cancer that most frequently occur in the lungs, but can arise in the cervix, prostate, liver pancreas, gastrointestinal tract or bladder.

[0213] In some embodiments, the cancer is Leiomyosarcoma. Leiomyosarcomas are a type of soft tissue sarcoma. In some embodiments, the leiomyosarcoma comprises a malignant tumor that arises from smooth muscle cells. Smooth muscles cells are the cells of involuntary muscles, i.e. muscles over which the brain has no voluntary control. Exemplary involuntary muscles comprise the walls of the digestive tract and muscles controlling salivary gland secretions. In some embodiments, the leiomyosarcoma grows and spreads into surrounding tissues. In some embodiments, the leiomyosarcoma spreads to distant sites of the body via the bloodstream or lymphatic system, or both. In some embodiments, a leiomyosarcoma can form almost anywhere where there are blood vessels, such as the heart, liver, pancreas, genitourinary and gastrointestinal tract, the space behind the abdominal cavity (retroperitoneum), the uterus or skin. In some of the more common embodiments, the leiomyosarcoma forms in the uterus. Symptoms, diagnosis and treatment of leiomyosarcomas varies depending on the location and stage of the cancer.

[0214] In some embodiments, the cancer is liver cancer. Liver cancers comprise cancers that form from cells of the liver. Exemplary but non-limiting liver cancers include hepatocellular carcinoma, cholangiocarcinoma and hepatoblastoma. In some embodiments, the liver cancer comprises a hepatocellular carcinoma. In some embodiments, the hepatocellular carcinoma occurs in a patient with chronic liver disease and cirrhosis. In some embodiments, the hepatocellular carcinoma forms from hepatic stem cells. In some embodiments, the liver cancer comprises a cholangiocarcinoma. In some embodiments, the cholangiocarcinoma forms in the bile ducts just outside the liver. In some embodiments, the cholangiocarcinoma is intrahepatic, extrahepatic (i.e., perihilar) or a distal extrahepatic cholangiocarcinoma. In some embodiments, the liver cancer comprises a hepatoblastoma. In some embodiments, the hepatoblastoma occurs in a child or an infant. In some embodiments, the hepatoblastoma originates from immature liver precursor cells. In some embodiments, the hepatoblastoma originates from pluripotent stem cells. In some embodiments, risk factors for liver cancer include obesity, diet, smoking, and genetic factors.

[0215] In some embodiments, the cancer is lung cancer. In some embodiments, the lung cancer is a small cell lung cancer. In some embodiments, the small cell lung cancer is a small cell carcinoma (oat cell cancer) or a combined small cell carcinoma. In some embodiments, the small cell carcinoma comprises a neuroendocrine subtype of lung cancer that likely arises from neuroendocrine cells in the lung. Risk factors include asbestos exposure and smoking. In some embodiments, the lung cancer is a non-small cell lung cancer. In some embodiments, the non-small cell lung cancer is a non-small cell lung carcinoma. In some embodiments, the non-small cell lung carcinoma is an epithelial lung cancer other than small cell lung carcinoma. In some embodiments the non-small cell lung cancer is an adenocarcinoma, a squamous cell (epidermoid) carcinoma, an adenosquamous carcinoma or a sarcomatoid carcinoma. Squamous cells are flat cells that line the insides of the airways in the lungs.

[0216] In some embodiments, the cancer is mesothelioma. Mesotheliomas comprise cancers that develop from the mesothelial, a thin layer of tissue lining lungs, abdomen or heart. In some embodiments, mesotheliomas affect the pleura that surrounds the lungs (pleural mesothelioma). In some embodiments, mesotheliomas affect the tissue of the abdomen (peritoneal mesothelioma). Risk factors for mesothelioma comprise asbestos exposure.

[0217] In some embodiments, the cancer is ovarian cancer. Ovarian cancers are cancers arising from cells of the ovaries. Ovarian cancers include, but are not limited to, ovarian epithelial cancers, germ cell tumors, ovarian carcinomas, ovarian stromal tumors and ovarian sarcoma.

[0218] In some embodiments, the cancer is pancreatic cancer. Pancreatic cancers typically arise from the cells in the pancreas, a glandular organ behind the stomach. In some, more frequent, embodiments, the pancreatic cancer is a pancreatic adenocarcinoma. Typically, pancreatic adenocarcinomas arise from the part of the pancreas which makes digestive enzymes. In some embodiments, the pancreatic cancer is a neuroendocrine tumor, which arises from the hormone producing cells of the pancreas.

[0219] In some embodiments, the cancer is renal cancer. Renal cancers are cancers that arise from cells of the kidney. In some embodiments, the renal cancer first appears in the tubules of the kidney. In some embodiments, the renal cancer is an adult cancer. In some embodiments, the renal cancer is a pediatric cancer. In some embodiments, the renal cancer is a renal cell carcinoma, an inherited papillary renal cell carcinoma, a urothelial cell carcinoma of the renal pelvis, a squamous cell carcinoma, a juxtaglomerular cell tumor (reninoma), an angiomyolipoma, a renal oncocytoma, a Bellini duct carcinoma, a clear-cell sarcoma of the kidney, a mesoblastic nephroma, a Wilms' tumor (usually diagnosed in children under 5 years of age) or a mixed epithelial stromal tumor.

[0220] In some embodiments, the cancer is rhabdomyosarcoma. In some embodiments, the rhabdomyosarcoma comprises an embryonal rhabdomyosarcoma. Embryonal rhabdomyosarcomas typically affect children in their first five years of life. The cells of an embryonal rhabdomyosarcoma comprise cells that resemble the developing muscle cells of a six to eight week embryo. In some embodiments, embryonal rhabdomyosarcomas comprise rhabdomyosarcomas of the head and neck area, bladder vagina, or in or around the prostate and testicles. In some embodiments, embryonal rhabdomyosarcomas comprise botryoid and spindle rhabdomyosarcomas. In some embodiments, the rhabdomyosarcoma comprises an alveolar rhabdomyosarcoma. Alveolar rhabdomyosarcomas typically affect all age groups equally. Alveolar rhabdomyosarcomas typically occur in the large muscles of the trunk, arms and legs. The cells of an alveolar rhabdomyosarcoma comprise cells that resemble those of normal muscle cells seen in a ten week old fetus. In some embodiments, the rhabdomyosarcoma comprises an anaplastic rhabdomyosarcoma.

[0221] In some embodiments, the cancer is a neuroblastoma. In some embodiments, neuroblastomas are cancers that begin in certain forms of nerve cells typically found in an embryo or fetus. In some embodiments, the nerve cells that give rise to the neuroblastoma are neuroblasts. Neuroblastomas occur most frequently in infants and young children, and are found only rarely in subjects older than ten years of age. In some embodiments, the neuroblastoma starts in the adrenal gland. In some embodiments, the neuroblastoma starts in the sympathetic nerve ganglia in the abdomen. In some embodiments, the neuroblastoma starts in the sympathetic nerve ganglia near the spine in the chest, neck or pelvis. In some embodiments, the neuroblastoma is a ganglioneuroblastoma. In some embodiments, the ganglioneuroblastoma comprises both malignant and benign components.

[0222] In some embodiments of the methods of treating cancer of the disclosure, the compositions of the disclosure, e.g. comprising nanoparticles comprising dsRNAs or siRNAs targeting GPC2, can be administered as a monotherapy.

[0223] In other embodiments, the nanoparticles comprising dsRNAs or siRNAs targeting GPC2 are administered in conjunction with agents useful for treating cancer, such as chemotherapeutic agents, or standards of care for the cancer. In some embodiments, the nanoparticle compositions of the disclosure can be administered as a combination therapy, i.e. in conjunction with one or more additional therapeutic agents. For example, a composition comprising nanoparticles comprising siRNAs targeting GPC2 can be administered with a chemotherapeutic agent. The chemotherapeutic agent can be platinum based antineoplastic agent, a DNA alkylating agent, a DNA intercalating agent, or a topoisomerase inhibitor. In some embodiments, the chemotherapeutic agent is selected from the group consisting of Cisplatin, Carboplatin, Cyclophosphamide, Doxorubicin, Topotecan or Etoposide.

[0224] In some embodiments, administration of nanoparticles comprising siRNAs targeting GPC2 or pharmaceutical compositions comprising same increases sensitivity of the cancer to an additional chemotherapeutic agent. For example, administering nanoparticle compositions can increase sensitivity to the additional chemotherapeutic agent such as Cisplatin, Carboplatin, Cyclophosphamide, Doxorubicin, Topotecan or Etoposide, thereby lowering the therapeutically effective amount of the chemotherapeutic agent. Administering nanoparticles comprising dsRNAs or siRNAs targeting GPC2 can, in some embodiments, decrease the IC50 of chemotherapeutic agents (the half maximal inhibitory concentration). In some embodiments, administering nanoparticles comprising dsRNAs or siRNAs targeting GPC2 can decrease the IC50 of a chemotherapeutic agent by at least 1 fold, at least 2 fold, at least 3 fold, at least 4 fold, at least 5 fold, at least 6 fold, at least 7 fold, at least 8 fold, at least 9 fold, at least 10 fold, at least 15 fold, at least 20 fold, at least 25 fold, at least 30 fold, at least 35 fold, at least 40 fold, at least 45 fold, at least 50 fold, at least 55 fold, at least 60 fold, at least 65 fold, at least 70 fold, at least 75 fold, or at least 80 fold. In some embodiments, administering nanoparticles comprising dsRNAs or siRNAs targeting GPC2 can decrease the IC50 of a chemotherapeutic agent by between about 1 and 80 fold, 1 and 70 fold, 1 and 60 fold, 1 and 50 fold, 1 and 40 fold, 1 and 30 fold, 1 and 20 fold, 1 and 10 fold, 3 and 80 fold, 3 and 70 fold, 3 and 60 fold, 3 and 50 fold, 3 and 40 fold, 3 and 30 fold, 3 and 20 fold, 3 and 10 fold, 5 and 70 fold, 5 and 60 fold, 5 and 55 fold, 5 and 50 fold, 5 and 45 fold, 5 and 40 fold, 5 and 35 fold, 5 and 30 fold, 5 and 25 fold, 5 and 20 fold, 5 and 15 fold, 5 and 10 fold, 10 and 70 fold, 10 and 50 fold, 20 and 50 fold, 20 and 40 fold, or 20 and 30 fold. In some embodiments, administering nanoparticles comprising dsRNAs or siRNAs targeting GPC2 can decrease the IC50 of a chemotherapeutic agent by between about 3 and 70 fold. In some embodiments, administering nanoparticles comprising dsRNAs or siRNAs targeting GPC2 can decrease the IC50 of a chemotherapeutic agent by between about 5 and 50 fold. In some embodiments, administering nanoparticles comprising dsRNAs or siRNAs targeting GPC2 can decrease the IC50 of a chemotherapeutic agent by between about 10 and 30 fold. In some embodiments, administration of nanoparticle compositions increases the effectiveness of the chemotherapeutic agent in the treatment of cancer. In some embodiments, administration of nanoparticles comprising dsRNAs or siRNAs targeting GPC2 can reduce a side effect of the chemotherapeutic agent. For example, if the chemotherapeutic agent is more effective when GPC2 expression is reduced, a lower amount of the chemotherapeutic agent can be administered to the subject, thereby reducing side effects. In some embodiments, administration of nanoparticles comprising dsRNAs or siRNAs targeting GPC2 reduces a sign or a symptom of the cancer.

[0225] The nanoparticle compositions of the disclosure, and the one or more additional therapeutic agent(s) can be administered simultaneously. For example, the nanoparticles comprising dsRNAs or siRNAs targeting GPC2 and the additional therapeutic agents(s) can be formulated in the same pharmaceutical composition, and are administered simultaneously to a subject. As a further example, the nanoparticles comprising dsRNAs or siRNAs targeting GPC2 may further comprise one or more additional chemotherapeutic agents, and are administered simultaneously to a subject.

[0226] Alternatively, or in addition, the additional therapeutic agent(s) can formulated in separate pharmaceutical composition from the nanoparticles comprising siRNAs of the disclosure, and can be administered separately to a subject. For example, the nanoparticles of the disclosure and the one or more additional therapeutic agent(s) may be delivered via different routes of administration, or on different delivery schedules.

[0227] In some embodiments, the one or more additional therapeutic agents are delivered in temporal proximity with the nanoparticles comprising siRNAs of the disclosure. As used herein, “temporal proximity” means sufficiently close in time to produce a combined effect (that is, temporal proximity can be simultaneously, or it can be two or more events occurring within a short time period before or after each other).

[0228] The composition comprising nanoparticles comprising dsRNAs or siRNAs targeting GPC2 can be administered to a subject with a cancer. In some embodiments, the administration occurs once a month. In some embodiments, the administration occurs every two weeks. In some embodiments, the administration occurs once a week. In some embodiments, the administration occurs once a day. In some embodiments, the administration occurs twice a day. In some embodiments, the administration occurs three times a day. In some embodiments, the administration occurs four or more times a day. In some embodiments, the subject is administered a composition comprising a therapeutically effective amount of the composition for at least a week, at least a month, at least 2 months, at least 3 months, at least 4 months, at least 5 months, at least 6 months, at least 1 year, at least 2 years, at least 3 years or until the cancer is alleviated.

[0229] In some embodiments, the composition comprising nanoparticles comprising dsRNAs or siRNAs targeting GPC2 is administered daily, every day, without a holiday. In some embodiments, the composition comprising nanoparticles comprising dsRNAs or siRNAs targeting GPC2 is administered with a holiday. In some embodiments, this holiday is once a week. In some embodiments, this holiday is twice a week. In some embodiments, this holiday is once every other week. In some embodiments, this holiday is once a month. In some embodiments, this holiday is determined by the effectiveness of the composition comprising nanoparticles comprising dsRNAs or siRNAs targeting GPC2 in alleviating a sign or a symptom of the cancer, and/or how well the subject with the cancer tolerates the administration of the composition.

[0230] In some embodiments, the composition comprising nanoparticles comprising dsRNAs or siRNAs targeting GPC2, and optionally, a chemotherapeutic agent, is administered simultaneously with one or more additional cancer therapies. In some embodiments, the nanoparticle composition is administered before an additional cancer therapy. In some embodiments, the nanoparticle composition is administered after an additional cancer therapy. In some embodiments, the nanoparticle composition and the additional cancer therapy are administered in alternation. In some embodiments, this additional cancer therapy comprises an additional chemotherapy.

[0231] In some embodiments of the methods of treating cancer of the disclosure, the methods further comprise a standard of care for the cancer. A standard of care for a cancer is a generally accepted appropriate treatment for a given cancer indication based on scientific evidence, and represents the current consensus of the scientific and medical communities. Standards of care for cancers can include, but are not limited to, radiation treatment, surgery to resect tumors, either partially or fully, and additional cancer therapies such as combination therapies, small molecule inhibitors or immunotherapies. An appropriate standard of care for a cancer will be apparent to the person of ordinary skill in the art.

[0232] A cancer that is to be treated can be staged according to an American Joint Committee on Cancer (AJCC) classification as Stage I, Stage IIA, Stage IIB, Stage IIIA, Stage IIIB, Stage IIIC, or Stage IV. A cancer that is to be treated can be assigned a grade according to an AJCC classification as Grade GX (e.g., grade cannot be assessed), Grade 1, Grade 2, Grade 3 or Grade 4. A cancer that is to be treated can be staged according to an AJCC pathologic classification (pN) of pNX, pN0, PN0 (I−), PN0 (I+), PN0 (mol−), PN0 (mol+), PN1, PN1 (mi), PN1a, PN1b, PN1c, pN2, pN2a, pN2b, pN3, pN3a, pN3b, or pN3c. Alternatively, or in addition, a cancer can be staged according to the TNM staging system, which divides most types of cancers into 4 stages. Stage 1 usually means that a cancer is relatively small and contained within the organ of origin. Stage 2 cancers have usually not started to spread into surround tissues, but that the tumor is larger than stage 1. In some embodiments, stage 2 means that the cancer has spread into the lymph nodes close to the tumor. Stage 3 cancers are usually larger, and have started to spread into surrounding tissues and lymph nodes. Stage 4, or metastatic cancers, are typically cancers that have spread from the point of origin to other organ(s) in the body.

[0233] A cancer that is to be treated can be evaluated by DNA cytometry, flow cytometry, or image cytometry. A cancer that is to be treated can be typed as having 10%, 20%, 30%, 40%, 50%, 60%, 70%, 80%, or 90% of cells in the synthesis stage of cell division (e.g., in S phase of cell division). A cancer that is to be treated can be typed as having a low S-phase fraction or a high S-phase fraction.

[0234] As used herein, a “normal cell” is a cell that cannot be classified as part of a “cell proliferative disorder”. A normal cell lacks unregulated or abnormal growth, or both, that can lead to the development of an unwanted condition or disease. Preferably, a normal cell possesses normally functioning cell cycle checkpoint control mechanisms.

[0235] As used herein, “contacting a cell” refers to a condition in which a compound or other composition of matter is in direct contact with a cell, or is close enough to induce a desired biological effect in a cell.

[0236] As used herein, “monotherapy” refers to the administration of a single active or therapeutic agent to a subject in need thereof. Preferably, monotherapy will involve administration of a therapeutically effective amount of an active agent. For example, administering a nanoparticle comprising an siRNA targeting GPC2 to a subject in need of treatment of cancer. Monotherapy may be contrasted with combination therapy, in which a combination of multiple active agents is administered, preferably with each component of the combination present in a therapeutically effective amount.

[0237] As used herein, “treating” or “treat” describes the management and care of a subject for the purpose of combating a disease, condition, or disorder and includes the administration of a pharmaceutical composition of the disclosure to alleviate the symptoms or complications of cancer or to eliminate the cancer.

[0238] As used herein, the term “alleviate” is meant to describe a process by which the severity of a sign or symptom of cancer is decreased. Importantly, a sign or symptom can be alleviated without being eliminated. In a preferred embodiment, the administration of pharmaceutical compositions of the disclosure leads to the elimination of a sign or symptom, however, elimination is not required. Effective dosages are expected to decrease the severity of a sign or symptom. For instance, a sign or symptom of a disorder such as cancer, which can occur in multiple locations, is alleviated if the severity of the cancer is decreased within at least one of multiple locations.

[0239] As used herein, the term “severity” is meant to describe the potential of cancer to transform from a precancerous, or benign, state into a malignant state. Alternatively, or in addition, severity is meant to describe a cancer stage, for example, according to the TNM system (accepted by the International Union Against Cancer (UICC) and the American Joint Committee on Cancer (AJCC)) or by other art-recognized methods. Cancer stage refers to the extent or severity of the cancer, based on factors such as the location of the primary tumor, tumor size, number of tumors, and lymph node involvement (spread of cancer into lymph nodes). Alternatively, or in addition, severity is meant to describe the tumor grade by art-recognized methods (see, National Cancer Institute, www.cancer.gov). Tumor grade is a system used to classify cancer cells in terms of how abnormal they look under a microscope and how quickly the tumor is likely to grow and spread. Many factors are considered when determining tumor grade, including the structure and growth pattern of the cells. The specific factors used to determine tumor grade vary with each type of cancer. Severity also describes a histologic grade, also called differentiation, which refers to how much the tumor cells resemble normal cells of the same tissue type (see, National Cancer Institute, www.cancer.gov). Furthermore, severity describes a nuclear grade, which refers to the size and shape of the nucleus in tumor cells and the percentage of tumor cells that are dividing (see, National Cancer Institute, www.cancer.gov).

[0240] As used herein, the term “aggressive” indicates a cancer that can grow, form or spread quickly. Cancers termed aggressive may be susceptible to treatment, or they may resist treatment. An aggressive cancer can comprise any sort of cancer. Alternatively, or in addition, the term “aggressive” may describe a cancer that requires a more severe or intense than the usual form of treatment for that cancer.

[0241] As used herein, the term “refractory” describes a cancer that does not respond to an attempted form of treatment. Refractory cancers can also be termed resistant cancers.

[0242] In another aspect of the disclosure, severity describes the degree to which a tumor has secreted growth factors, degraded the extracellular matrix, become vascularized, lost adhesion to juxtaposed tissues, or metastasized. Moreover, severity describes the number of locations to which a primary tumor has metastasized. Finally, severity includes the difficulty of treating tumors of varying types and locations. For example, inoperable tumors, those cancers which have greater access to multiple body systems (hematological and immunological tumors), and those which are the most resistant to traditional treatments are considered most severe. In these situations, prolonging the life expectancy of the subject and/or reducing pain, decreasing the proportion of cancerous cells or restricting cells to one system, and improving cancer stage/tumor grade/histological grade/nuclear grade are considered alleviating a sign or symptom of the cancer.

[0243] As used herein the term “symptom” is defined as an indication of disease, illness, injury, or that something is not right in the body. Symptoms are felt or noticed by the individual experiencing the symptom, but may not easily be noticed by others. Others are defined as non-health-care professionals.

[0244] As used herein the term “sign” is also defined as an indication that something is not right in the body. But signs are defined as things that can be seen by a doctor, nurse, or other health care professional.

[0245] Cancer is a group of diseases that may cause almost any sign or symptom. The signs and symptoms will depend on where the cancer is, the size of the cancer, and how much it affects the nearby organs or structures. If a cancer spreads (metastasizes), then symptoms may appear in different parts of the body.

[0246] As a cancer grows, it begins to push on nearby organs, blood vessels, and nerves. This pressure creates some of the signs and symptoms of cancer. Cancers may form in places where it does not cause any symptoms until the cancer has grown quite large.

[0247] Cancer may also cause symptoms such as fever, fatigue, or weight loss. This may be because cancer cells use up much of the body's energy supply or release substances that change the body's metabolism. Or the cancer may cause the immune system to react in ways that produce these symptoms. While the signs and symptoms listed above are the more common ones seen with cancer, there are many others that are less common and are not listed here. However, all art-recognized signs and symptoms of cancer are contemplated and encompassed by the disclosure.

[0248] Treating cancer may result in a reduction in size of a tumor. A reduction in size of a tumor may also be referred to as “tumor regression”. Preferably, after treatment according to the methods of the disclosure, tumor size is reduced by 5% or greater relative to its size prior to treatment; more preferably, tumor size is reduced by 10% or greater; more preferably, reduced by 20% or greater; more preferably, reduced by 30% or greater; more preferably, reduced by 40% or greater; even more preferably, reduced by 50% or greater; and most preferably, reduced by greater than 75% or greater. Size of a tumor may be measured by any reproducible means of measurement. The size of a tumor may be measured as a diameter of the tumor.

[0249] Treating cancer may result in a reduction in tumor volume. Preferably, after treatment according to the methods of the disclosure, tumor volume is reduced by 5% or greater relative to its size prior to treatment; more preferably, tumor volume is reduced by 10% or greater; more preferably, reduced by 20% or greater; more preferably, reduced by 30% or greater; more preferably, reduced by 40% or greater; even more preferably, reduced by 50% or greater; and most preferably, reduced by greater than 75% or greater. Tumor volume may be measured by any reproducible means of measurement.

[0250] Treating cancer may result in a decrease in number of tumors. Preferably, after treatment, tumor number is reduced by 5% or greater relative to number prior to treatment; more preferably, tumor number is reduced by 10% or greater; more preferably, reduced by 20% or greater; more preferably, reduced by 30% or greater; more preferably, reduced by 40% or greater; even more preferably, reduced by 50% or greater; and most preferably, reduced by greater than 75%. Number of tumors may be measured by any reproducible means of measurement. The number of tumors may be measured by counting tumors visible to the naked eye or at a specified magnification. Preferably, the specified magnification is 2×, 3×, 4×, 5×, 10×, or 50×.

[0251] Treating cancer may result in a decrease in number of metastatic lesions in other tissues or organs distant from the primary tumor site. Preferably, after treatment according to the methods of the disclosure, the number of metastatic lesions is reduced by 5% or greater relative to number prior to treatment; more preferably, the number of metastatic lesions is reduced by 10% or greater; more preferably, reduced by 20% or greater; more preferably, reduced by 30% or greater; more preferably, reduced by 40% or greater; even more preferably, reduced by 50% or greater; and most preferably, reduced by greater than 75%. The number of metastatic lesions may be measured by any reproducible means of measurement. The number of metastatic lesions may be measured by counting metastatic lesions visible to the naked eye or at a specified magnification. Preferably, the specified magnification is 2×, 3×, 4×, 5×, 10×, or 50×.

[0252] Treating cancer can result in stabilization of disease where tumors neither progress nor regress. Preferably, stabilization will be maintained by more than 30 days; more preferably, by more than 60 days; more preferably, by more than 90 days; and most preferably, by more than 120 days.

[0253] Treating cancer can result in an increase in average survival time of a population of treated subjects in comparison to a population receiving carrier alone. Preferably, the average survival time is increased by more than 30 days; more preferably, by more than 60 days; more preferably, by more than 90 days; and most preferably, by more than 120 days. An increase in average survival time of a population may be measured by any reproducible means. An increase in average survival time of a population may be measured, for example, by calculating for a population the average length of survival following initiation of treatment with an active agent. An increase in average survival time of a population may also be measured, for example, by calculating for a population the average length of survival following completion of a first round of treatment with an active agent.

[0254] Treating cancer can result in an increase in average survival time of a population of treated subjects in comparison to a population of untreated subjects. Preferably, the average survival time is increased by more than 30 days; more preferably, by more than 60 days; more preferably, by more than 90 days; and most preferably, by more than 120 days. An increase in average survival time of a population may be measured by any reproducible means. An increase in average survival time of a population may be measured, for example, by calculating for a population the average length of survival following initiation of treatment with an active agent. An increase in average survival time of a population may also be measured, for example, by calculating for a population the average length of survival following completion of a first round of treatment with an active agent.

[0255] Treating cancer can result in increase in average survival time of a population of treated subjects in comparison to a population receiving monotherapy with a drug or standard of care that is not a nanoparticle composition of the present invention. Preferably, the average survival time is increased by more than 30 days; more preferably, by more than 60 days; more preferably, by more than 90 days; and most preferably, by more than 120 days. An increase in average survival time of a population may be measured by any reproducible means. An increase in average survival time of a population may be measured, for example, by calculating for a population the average length of survival following initiation of treatment with an active agent. An increase in average survival time of a population may also be measured, for example, by calculating for a population the average length of survival following completion of a first round of treatment with an active agent.

[0256] Treating cancer can result in a decrease in the mortality rate of a population of treated subjects in comparison to a population receiving carrier alone. Treating cancer can result in a decrease in the mortality rate of a population of treated subjects in comparison to an untreated population. Treating cancer can result in a decrease in the mortality rate of a population of treated subjects in comparison to a population receiving monotherapy with a drug that is not a pharmaceutical composition of the present invention. Preferably, the mortality rate is decreased by more than 2%; more preferably, by more than 5%; more preferably, by more than 10%; and most preferably, by more than 25%. A decrease in the mortality rate of a population of treated subjects may be measured by any reproducible means. A decrease in the mortality rate of a population may be measured, for example, by calculating for a population the average number of disease-related deaths per unit time following initiation of treatment with an active agent. A decrease in the mortality rate of a population may also be measured, for example, by calculating for a population the average number of disease-related deaths per unit time following completion of a first round of treatment with an active agent.

[0257] Treating cancer can result in a decrease in tumor growth rate. Preferably, after treatment, tumor growth rate is reduced by at least 5% relative to number prior to treatment; more preferably, tumor growth rate is reduced by at least 10%; more preferably, reduced by at least 20%; more preferably, reduced by at least 30%; more preferably, reduced by at least 40%; more preferably, reduced by at least 50%; even more preferably, reduced by at least 50%; and most preferably, reduced by at least 75%. Tumor growth rate may be measured by any reproducible means of measurement. Tumor growth rate can be measured according to a change in tumor diameter per unit time.

[0258] Treating cancer can result in a decrease in tumor regrowth. Preferably, after treatment, tumor regrowth is less than 5%; more preferably, tumor regrowth is less than 10%; more preferably, less than 20%; more preferably, less than 30%; more preferably, less than 40%; more preferably, less than 50%; even more preferably, less than 50%; and most preferably, less than 75%. Tumor regrowth may be measured by any reproducible means of measurement. Tumor regrowth is measured, for example, by measuring an increase in the diameter of a tumor after a prior tumor shrinkage that followed treatment. A decrease in tumor regrowth is indicated by failure of tumors to reoccur after treatment has stopped.

[0259] Treating cancer can result in a reduction in the rate of cellular proliferation. Preferably, after treatment, the rate of cellular proliferation is reduced by at least 5%; more preferably, by at least 10%; more preferably, by at least 20%; more preferably, by at least 30%; more preferably, by at least 40%; more preferably, by at least 50%; even more preferably, by at least 50%; and most preferably, by at least 75%. The rate of cellular proliferation may be measured by any reproducible means of measurement. The rate of cellular proliferation is measured, for example, by measuring the number of dividing cells in a tissue sample per unit time.

[0260] Treating cancer can result in a reduction in the proportion of proliferating cells. Preferably, after treatment, the proportion of proliferating cells is reduced by at least 5%; more preferably, by at least 10%; more preferably, by at least 20%; more preferably, by at least 30%; more preferably, by at least 40%; more preferably, by at least 50%; even more preferably, by at least 50%; and most preferably, by at least 75%. The proportion of proliferating cells may be measured by any reproducible means of measurement. Preferably, the proportion of proliferating cells is measured, for example, by quantifying the number of dividing cells relative to the number of nondividing cells in a tissue sample. The proportion of proliferating cells can be equivalent to the mitotic index.

[0261] Treating cancer can result in a decrease in size of an area or zone of cellular proliferation. Preferably, after treatment, size of an area or zone of cellular proliferation is reduced by at least 5% relative to its size prior to treatment; more preferably, reduced by at least 10%; more preferably, reduced by at least 20%; more preferably, reduced by at least 30%; more preferably, reduced by at least 40%; more preferably, reduced by at least 50%; even more preferably, reduced by at least 50%; and most preferably, reduced by at least 75%. Size of an area or zone of cellular proliferation may be measured by any reproducible means of measurement. The size of an area or zone of cellular proliferation may be measured as a diameter or width of an area or zone of cellular proliferation.

[0262] Treating cancer can result in a decrease in the number or proportion of cells having an abnormal appearance or morphology. Preferably, after treatment, the number of cells having an abnormal morphology is reduced by at least 5% relative to its size prior to treatment; more preferably, reduced by at least 10%; more preferably, reduced by at least 20%; more preferably, reduced by at least 30%; more preferably, reduced by at least 40%; more preferably, reduced by at least 50%; even more preferably, reduced by at least 50%; and most preferably, reduced by at least 75%. An abnormal cellular appearance or morphology may be measured by any reproducible means of measurement. An abnormal cellular morphology can be measured by microscopy, e.g., using an inverted tissue culture microscope. An abnormal cellular morphology can take the form of nuclear pleiomorphism.

[0263] Treating cancer can result in cell death, and preferably, cell death results in a decrease of at least 10% in number of cells in a population. More preferably, cell death means a decrease of at least 20%; more preferably, a decrease of at least 30%; more preferably, a decrease of at least 40%; more preferably, a decrease of at least 50%; most preferably, a decrease of at least 75%. Number of cells in a population may be measured by any reproducible means. A number of cells in a population can be measured by fluorescence activated cell sorting (FACS), immunofluorescence microscopy and light microscopy. Methods of measuring cell death are as shown in Li et al., Proc Natl Acad Sci USA. 100(5): 2674-8, 2003. In some aspects, cell death occurs by apoptosis.

### Routes of Administration

[0264] Nanoparticles comprising dsRNAs or siRNAs targeting GPC2 can be administered to a subject by many of the well-known methods currently used for therapeutic treatment. For example, for treatment of cancers, a compositions comprising siRNAs targeting GPC2 may be injected directly into tumors, injected into the blood stream or body cavities or taken orally or applied through the skin with patches. The dose chosen should be sufficient to constitute effective treatment but not so high as to cause unacceptable side effects. The state of the disease condition (e.g., cancer, precancer, and the like) and the health of the patient should preferably be closely monitored during and for a reasonable period after treatment.

[0265] The compositions comprising nanoparticles comprising dsRNAs or siRNAs targeting GPC2 can be administered orally, nasally, transdermally, pulmonary, inhalationally, buccally, sublingually, intraperintoneally, subcutaneously, intramuscularly, intravenously, rectally, intrapleurally, intrathecally and parenterally. In some embodiments, the parenteral administration comprises intramuscular, intraperitoneal, subcutaneous or intravenous administration. One skilled in the art will recognize the advantages of certain routes of administration.

[0266] Compositions of the disclosure comprising nanoparticles may be administered parenterally. Systemic administration of compositions comprising nanoparticles of the disclosure can also be by intravenous, transmucosal, subcutaneous, intraperitoneal, intramuscular or transdermal means. For intravenous parenteral administration, compositions comprising nanoparticles may be administered by injection or by infusion. For transmucosal or transdermal administration, penetrants appropriate to the barrier to be permeated are used in the formulation. Such penetrants are generally known in the art, and include, for example, for transmucosal administration, detergents, bile salts, and fusidic acid derivatives. Transmucosal administration can be accomplished through the use of nasal sprays or suppositories.

### Dosages

[0267] In therapeutic applications, the dosages of the pharmaceutical compositions used in accordance with the invention vary depending on the agent, the age, weight, and clinical condition of the recipient patient, and the experience and judgment of the clinician or practitioner administering the therapy, among other factors affecting the selected dosage. Generally, the dose should be sufficient to result in slowing, and preferably regressing, the growth of the tumors and also preferably causing complete regression of the cancer. Dosages may vary depending on the age and size of the subject and the type and severity of the cancer.

[0268] The term “therapeutically effective amount”, as used herein, refers to an amount of a pharmaceutical agent to treat, ameliorate, or prevent a cancer in a subject, or to exhibit a detectable therapeutic or inhibitory effect on said cancer in a subject. The effect can be detected by any assay method known in the art. The precise effective amount for a subject will depend upon the subject's body weight, size, and health; the nature and extent of the condition; and the therapeutic or combination of therapeutics selected for administration. Therapeutically effective amounts for a given situation can be determined by routine experimentation that is within the skill and judgment of the clinician.

[0269] For any dsRNA or siRNA, the therapeutically effective amount can be estimated initially either in cell culture assays, e.g., of neoplastic cells, or in animal models, usually rats, mice, rabbits, dogs, or pigs. The animal model may also be used to determine the appropriate concentration range and route of administration. In some embodiments, a standard xenograft or patient derived xenograft mouse model can be used to determine the effectiveness of GPC2 targeting dsRNAs or siRNAs on a cancer of the disclosure. Such information can then be used to determine useful doses and routes for administration in humans. Therapeutic/prophylactic efficacy and toxicity may be determined by standard pharmaceutical procedures in cell cultures or experimental animals, e.g., the maximum tolerated dose and no observable adverse effect dose. Pharmaceutical compositions that exhibit large therapeutic windows are preferred. The dosage may vary within this range depending upon the dosage form employed, sensitivity of the patient, and the route of administration.

[0270] Dosage and administration are adjusted to provide sufficient levels of the active agent(s) or to maintain the desired effect. Factors which may be taken into account include the severity of the disease state, general health of the subject, age, weight, and gender of the subject, diet, time and frequency of administration, drug combination(s), reaction sensitivities, and tolerance/response to therapy. Long-acting pharmaceutical compositions may be administered every 3 to 4 days, every week, or once every two weeks depending on half-life and clearance rate of the particular formulation.

[0271] The dosage of nanoparticles comprising dsRNAs or siRNAs required depends on the choice of the route of administration; the nature of the formulation; the nature of the patient's illness; the subject's size, weight, surface area, age, and sex; other drugs being administered; and the judgment of the attending physician. Wide variations in the needed dosage are to be expected in view of the differing efficiencies of various routes of administration. For example, oral administration would be expected to require higher dosages than administration by intravenous injection (e.g., 2-, 3-, 4-, 6-, 8-, 10-; 20-, 50-, 100-, 150-, or more fold). Variations in these dosage levels can be adjusted using standard empirical routines for optimization as is well understood in the art. Administrations can be single or multiple. Encapsulation of the inhibitor in a suitable delivery vehicle (e.g., capsules or implantable devices) may increase the efficiency of delivery, particularly for oral delivery.

[0272] A therapeutically effective dose of nanoparticles comprising GPC2 targeting dsRNAs or siRNAs described herein can optionally be combined with approved amounts of therapeutic agents, and described herein. For example, a therapeutically effective dose of the nanoparticles comprising dsRNAs or siRNAs described herein can be combined with a therapeutically effective amount of Cisplatin, Carboplatin, Cyclophosphamide, Doxorubicin, Topotecan or Etoposide. In some embodiments, a therapeutically effective dose of nanoparticles comprising GPC2 targeting dsRNAs or siRNAs described herein, and optionally, a therapeutically effective dose of an additional therapeutic agent, can be combined with a standard of care for a cancer.

### Kits and Articles of Manufacture

[0273] The invention provides kits comprising any one or more of the compositions described herein, including but not limited to compositions comprising nanoparticles comprising siRNAs targeting GPC2, the nanoparticles optionally comprising one or more chemotherapeutic agents. The kits are for use in the treatment of cancer.

[0274] Nanoparticles comprising siRNAs targeting GPC2 can be lyophilized before being packaged in the kit, or can be provided in solution with a pharmaceutically acceptable carrier, diluent of excipient.

[0275] In some embodiments of the kits of the disclosure, the kit comprises a therapeutically effective amount of the composition comprising nanoparticles comprising siRNAs targeting GPC2, and instructions for use in the treatment of cancer. In some embodiments, the kit further comprises at least one additional cancer therapeutic agent, such as Cisplatin, Carboplatin, Cyclophosphamide, Doxorubicin, Topotecan or Etoposide.

[0276] In some embodiments, the nanoparticle comprises PLGA polymers and an HA targeting agent.

[0277] Articles of manufacture include, but are not limited to, instructions for use of the kit in treating cancers, for example astrocytoma, breast cancer, colorectal cancer, Ewing's sarcoma, gastric cancer, leiomyosarcoma, liver cancer, lung cancer, mesothelioma, ovarian cancer, pancreatic cancer, renal cancer, rhabdomyosarcoma or neuroblastoma.

[0278] In some embodiments, the kits further comprise instructions for administering the nanoparticles and pharmaceutical compositions comprising same of the disclosure.

[0279] All percentages and ratios used herein, unless otherwise indicated, are by weight. Other features and advantages of the present invention are apparent from the different examples. The provided examples illustrate different components and methodology useful in practicing the present invention. The examples do not limit the claimed invention. Based on the present disclosure the skilled artisan can identify and employ other components and methodology useful for practicing the present invention.

### EXAMPLES

### Example 1: Expression of Glypican-2 Across Multiple Cancer Cell Lines and Multiple Cancer Indications

[0280] GPC2 mRNA expression levels were determined across multiple cell lines and multiple cancer indications from the Cancer Genome Atlas database, a publicly available resource. Reads Per Kilobase of transcript per Million (RPKM) values were tabulated. Levels greater than 1 represent an increased level of GPC2 mRNA expression. As shown, a significant degree of GPC2 mRNA expression is present across all of the cell lines examined in this analysis. Levels of Glypican-2 are shown in Table 6:

TABLE 6
Glypican-2 expression in multiple cell
lines and multiple cancer indications.

| | | Normalized GPC2 expression |
|---|---|---|
| Indication | Cell line | (RPKM values) |
| Astrocytoma | U138MG | 4.36 |
| | LN18 | 4.77 |
| | A172 | 4.83 |
| | U118MG | 4.91 |
| Breast cancer | BT549 | 4.74 |
| | SKBR3 | 4.78 |
| | MCF7 | 5.06 |
| Colorectal cancer | HCT116 | 4.25 |
| | T84 | 4.8 |
| | COLO205 | 4.87 |
| Ewing's sarcoma | TC-32 | 5.26 |
| | TC71 | 5.75 |
| Gastric Cancer | AGS | 4.58 |
| | NCIN87 | 4.59 |
| | KATOIII | 4.95 |
| | SNU16 | 5.27 |
| Leiomyosarcoma | SKUT1 | 4.67 |
| | SKLMS1 | 4.97 |
| Liver cancer | HEPG2 | 4.83 |
| | C3A | 5.01 |
| | HEP3B217 | 5.08 |
| | JHH5 | 5.11 |
| Lung cancer | SW1271 | 5.15 |
| | DMS114 | 5.34 |
| | SHP77 | 5.37 |
| Mesothelioma | MSTO211H | 4.74 |
| Ovarian cancer | COV362 | 4.95 |
| | TOV112D | 5.06 |
| | SKOV3 | 4.20 |
| | OV90 | 5.16 |
| Pancreatic cancer | HS766T | 4.24 |
| | BXPC3 | 4.33 |
| | CAPAN1 | 4.72 |
| Renal cancer | A704 | 4.35 |
| | 786O | 4.36 |
| | CAKI1 | 4.54 |
| | 769P | 4.55 |
| Rhabdomyosarcoma | RH18 | 4.77 |
| | RH30 | 5.16 |
| | RH41 | 5.74 |
| Neuroblastoma | MHHNB11 | 7.64 |
| | KPNRTBM1 | 7.77 |
| | SHSY5Y | 8.43 |
| | SKNAS | 5.01 |
| | CHP212 | 5.04 |
| | IMR32 | 6.53 |

[0281] As can be seen in Table 6, GPC-2 is expressed in multiple cancer cell lines from astrocytoma, breast cancer, colorectal cancer, Ewing's sarcoma, gastric cancer, leiomyosarcoma, liver cancer, lung cancer, ovarian cancer, pancreatic cancer, renal cancer, rhadomyosarcoma and neuroblastoma cells, as well as a mesothelioma cell line.

[0282] GPC2 protein levels were assayed in neuroblastoma tumors, and levels of GPC2 protein were compared to normal tissues (FIG. 1). GPC2 protein expression levels were determined across multiple tumor tissues and normal peripheral nerve tissues via immunohistochemistry using an antibody against GPC2. The degree of GPC2 staining was quantified using an automated image analyzer and plotted the percent GPC2 staining. Data show on average that significant expression of GPC2 can be detected in neuroblastoma tumors compared to normal tissues.

### Example 2: GPC2 mRNA Knockdown Using siRNAs in TC-32 Ewing's Sarcoma Cells

[0283] Several siRNA sequences (n=15) were screened to determine their ability to knockdown (KD) GPC2 expression in multiple cancer cell lines. siRNA sequences were identified using an open source online tool available from either Sigma (sequences 1-11; see www.sigmaaldrich.com/life-science/custom-oligos/sima-oligos/sima-design-service.html or from Dharmacon (sequences 12-15; see dharmacon.horizondiscovery.com/custom-sima). The listed sequences span the full length of the mature GPC2 mRNA. Sense and anti-sense strands for representative siRNAs are shown in Table 7.

TABLE 7
GPC2 siRNAs.

| Name | Sense | Anti-sense |
|---|---|---|
| GPC2 | CUCCUGAUCCUGGCUGAUA[dT][dT] | UAUCAGCCAGGAUCAGGAG[dT][dT] |
| siRNA 1: | (SEQ ID NO: 203) | (SEQ ID NO: 204) |
| GPC2 | CUCAUCUACCGAUGGCUCU[dT][dT] | AGAGCCAUCGGUAGAUGAG[dT][dT] |
| siRNA 2: | (SEQ ID NO: 205) | (SEQ ID NO: 206) |
| GPC2 | CCUGCUUGGACCUCGAUAA[dT][dT] | UUAUCGAGGUCCAAGCAGG[dT][dT] |
| siRNA 3: | (SEQ ID NO: 207) | (SEQ ID NO: 208) |
| GPC2 | GUGGUUCGUGGCUGUCUCA[dT][dT] | UGAGACAGCCACGAACCAC[dT][dT] |
| siRNA 4: | (SEQ ID NO: 209) | (SEQ ID NO: 210) |
| GPC2 | CUCAGUAGCCCAGCACUCU[dT][dT] | AGAGUGCUGGGCUACUGAG[dT][dT] |
| siRNA 5: | (SEQ ID NO: 211) | (SEQ ID NO: 212) |
| GPC2 | CUGCUGUUCCAGUGAGACA[dT][dT] | UGUCUCACUGGAACAGCAG[dT][dT] |
| siRNA 6: | (SEQ ID NO: 213) | (SEQ ID NO: 214) |
| GPC2 | CUCCUUUCUGGUUCACACA[dT][dT] | UGUGUGAACCAGAAAGGAG[dT][dT] |
| siRNA 7: | (SEQ ID NO: 215) | (SEQ ID NO: 216) |
| GPC2 | GAGUGUGGUUUCCUUAGAA[dT][dT] | UUCUAAGGAAACCACACUC[dT][dT] |
| siRNA 8: | (SEQ ID NO: 217) | (SEQ ID NO: 218 |
| GPC2 | GAGUACACCUGCUGUUCCA[dT][dT] | UGGAACAGCAGGUGUACUC[dT][dT] |
| siRNA 9: | (SEQ ID NO: 219) | (SEQ ID NO: 220) |
| GPC2 | GACACGACCUGGACGGGCA[dT][dT] | UGCCCGUCCAGGUCGUGUC[dT][dT] |
| siRNA 10: | (SEQ ID NO: 221) | (SEQ ID NO: 222) |
| GPC2 | CUGACUACCUGCUCUGCCU[dT][dT] | AGGCAGAGCAGGUAGUCAG[dT][dT] |
| siRNA 11: | (SEQ ID NO: 223) | (SEQ ID NO: 224) |
| GPC2 | GCGCUUAAGGUGCCGGUGU[dT][dT] | ACACCGGCACCUUAAGCGC[dT][dT] |
| siRNA 12: | (SEQ ID NO: 225) | (SEQ ID NO: 226) |
| GPC2 | CCUUUGAGCUGACGGCCGA[dT][dT] | UCGGCCGUCAGCUCAAAGG[dT][dT] |
| siRNA 13: | (SEQ ID NO: 227) | (SEQ ID NO: 228) |
| GPC2 | CCUGCUUCUGCUGCUGCCU[dT][dT] | AGGCAGCAGCAGAAGCAGG[dT][dT] |
| siRNA 14: | (SEQ ID NO: 229) | (SEQ ID NO: 230) |
| GPC2 | GAAGAAAUGUGGUCAGCGA[dT][dT] | UCGCUGACCACAUUUCUUC[dT][dT] |
| siRNA 15: | (SEQ ID NO: 231) | (SEQ ID NO: 232) |

[0284] Unless otherwise indicated, sequences in Table 7 refer to ribonucleic acids (RNAs). d[T] refers to deoxyribonucleic acids (DNA).

[0285] siRNAs 1-5 from Table 7 were diluted to 40 nM in OptiMEM media and mixed in a 1:3 ratio (weight by volume) with RNAiMAX. This was incubated for 15 minutes at room temperature and dispensed onto cells plated in a 6 well tissue culture plate. Total RNA samples were collected at either 72 hours post transfection to compare knockdown efficiency (FIG. 2A), or at 24, 48, 72 or 96 hours post transfection to determine the extent of GPC2 mRNA knockdown over time (FIG. 2B). Expression levels of mRNA of GPC2 were measured in these samples using primers specific for GPC2 obtained commercially from Thermofisher (Carlsbad, Calif.) and standard qPCR technique. Taken together these data indicate that the greatest degree of GPC2 knockdown was observed with sequences 3 and 5 and that knockdown lasts for at least 96 hours post transfection.

### Example 3: GPC2 mRNA Knockdown Affects Cell Viability in Multiple Cancer Cell Lines

[0286] GPC2 mRNA knockdown and changes in cell viability were assessed in multiple cancer cell lines. Cells were transfected with either a scrambled control siRNA or with GPC2 siRNA sequence 3 or sequence 5 from Table 7 using the RNAiMAX Lipofectamine kit (Invitrogen, Carlsbad, Calif.) as previously described in Example 2, either in 96 well format (for viability assays) or 6 well format (for knockdown assessment). Following a 96 hour incubation period, cells were washed and the viability measurement was assessed using Cell Titer Glo 2.0. Total RNA was isolated from the 6 well plate samples to determine knockdown efficiency.

[0287] As shown in Table 8, although GPC2 knockdown was observed in each cell line using both sequences 3 and 5, the degree of GPC2 knockdown was cell line dependent. In most instances, knockdown of GPC2 expression resulted in a decrease in cell viability.

TABLE 8
Effect of siRNA mediated GPC2 knockdown
across multiple cancer cell lines

| | | siRNA | % GPC2 | % |
|---|---|---|---|---|
| Cell Line | Indication | sequence | knockdown | Viability |
| MCF7 | Breast | Sequence 3 | 72 | 79.67 |
| | | Sequence 5 | 82 | 67.11 |
| SKNAS | Neuroblastoma | Sequence 3 | 25 | 84.58 |
| | | Sequence 5 | 44 | 56.14 |
| CHP212 | | Sequence 3 | 50 | 70.18 |
| | | Sequence 5 | 65 | 64.46 |
| IMR32 | | Sequence 3 | 36 | 89.05 |
| | | Sequence 5 | 25 | 63.62 |
| RH30 | Rhabdomyosarcoma | Sequence 3 | 78 | 79.02 |
| | | Sequence 5 | 83 | 46.03 |
| RH41 | | Sequence 3 | 37 | 131.49 |
| | | Sequence 5 | 60 | 31.32 |
| TC32 | Ewing's Sarcoma | Sequence 3 | 69 | 78.24 |
| | | Sequence 5 | 57 | 77.18 |
| TC71 | | Sequence 3 | 42 | 102.39 |
| | | Sequence 5 | 33 | 100.92 |
| TOV112D | Ovarian Carcinoma | Sequence 3 | 89 | 152.77 |
| | | Sequence 5 | 78 | 81.15 |
| COV362 | | Sequence 3 | 85 | 102.76 |
| | | Sequence 5 | 79 | 94.27 |
| SNU16 | Gastric | Sequence 3 | 53 | 92.74 |
| | | Sequence 5 | 25 | 89.01 |
| GIST-T1 | Gastrointestinal | Sequence 3 | 61 | 70.87 |
| | Stromal | Sequence 5 | 76 | 40.13 |

### Example 4: Comparison of the Activity of Multiple GPC2 siRNA Sequences in Neuroblastoma Cell Lines

[0288] GPC2 mRNA knockdown was assessed in multiple neuroblastoma cell lines. Cells were transfected with either a scrambled control siRNA, with GPC2 siRNA sequences 3 or 5 from Table 7, or with siRNA sequences generated by Dharmacon (sequences 12-15 from Table 7) using the RNAiMAX Lipofectamine kit (Invitrogen, Carlsbad, Calif.) as previously described. Following a 96 hour incubation period, total RNA samples were collected to compare knockdown efficiency and viability was measured in parallel plated cells. As shown, although GPC2 knockdown was observed in each cell line using most siRNA sequences (FIG. 3A), the degree of GPC2 knockdown was greater with sequences 3 and 5 and corresponding greater viability decrease was observed (FIG. 3B).

[0289] The extent of GPC2 mRNA reduction was assessed with additional GPC2 siRNA sequences in the CHP212 neuroblastoma cell line. Cells were transfected with either a scrambled control siRNA or with GPC2 siRNA sequences 3 or 5, or with siRNA sequences 6-11 (Sigma) using the RNAiMAX Lipofectamine kit (Invitrogen, Carlsbad, Calif.) as previously described. Following a 96 hour incubation period, total RNA samples were collected and viability was measured in parallel plated cells. As shown, although GPC2 knockdown was observed using most siRNA sequences (FIG. 4A), the degree of GPC2 knockdown was greater with sequences 5 and 7 and corresponding greater viability decrease was observed (FIG. 4B).

[0290] The extent of GPC2 mRNA reduction (knockdown) and corresponding protein level expression changes were assessed in three neuroblastoma cell lines following siRNA knockdown of GPC2. The CHP212 neuroblastoma cell line (FIG. 5A and FIG. 5D), the SH-SY5Y neuroblastoma cell line (FIG. 5B and FIG. 5E) and the CHLA90 neuroblastoma cell line (FIG. 5C and FIG. 5F) were transfected with GPC2 siRNA sequences 5 and 7 from Table 7 and a scrambled control siRNA using the RNAiMAX Lipofectamine kit (Invitrogen, Carlsbad, Calif.) as previously described. Following a 24, 48, or 72 hour incubation period, cells were washed and total RNA was isolated for measuring GPC2 mRNA expression. For protein analysis, cells were fixed, immunostained using an antibody against GPC2 protein, protein expression was measured via flow cytometry. As shown, GPC2 mRNA knockdown was observed beginning at the 24 hr time point and lasted for at least 72 hours. GPC2 protein expression started to decrease at the 48 hr time point.

### Example 5: Knockdown of GPC2 mRNA Results in an Increased Sensitivity to Cisplatin

[0291] GPC2 mRNA was reduced using the indicated siRNAs and changes in cell viability were assessed in multiple cancer cell lines, in combination with Cisplatin treatment. Cells were transfected with either a scrambled control siRNA or with GPC2 siRNA sequences 3 or 5 from Table 7 using the RNAiMAX Lipofectamine kit (Invitrogen, Carlsbad, Calif.), as previously described, in either in 96 well (for viability assays) or 6 well format (for total RNA). Cisplatin was added at increasing concentrations (0 to 30 uM) to transfected cells at 24 hours post transfection. Following a 72 hour incubation period, cell viability was measured using Cell Titer Glo 2.0. Total RNA samples were also isolated to measure knockdown efficiency. As shown in Table 9 below, siRNA mediated knockdown of GPC2 was associated with an increase in the sensitivity to Cisplatin in several cell lines, most notably in neuroblastoma cells.

TABLE 9
Effect of siRNA mediated GPC2 knockdown on sensitivity to Cisplatin in
multiple cell lines

| | | % GPC2 | | | | | |
|---|---|---|---|---|---|---|---|
| | | knockdown | | Cisplatin IC₅₀ (μM) | | | |
| Cell | | siRNA | siRNA | | siRNA | siRNA | |
| Line | Indication | #3¹ | #5² | Ctl³ | #3¹ | #5² | Data Summary |
| RH30 | Rhabdomyo- | 80 | 86 | 2.1 | 2.1 | 2.5 | KD⁴ with sequence 3 or 5 |
| | sarcoma | | | | | | does not increase |
| | | | | | | | sensitivity to cisplatin |
| RH41 | | 55 | 70 | 3.9 | 3.2 | 1 | KD with sequence 5 |
| | | | | | | | increases sensitivity to |
| | | | | | | | cisplatin |
| SNU16 | Gastric | 50 | 52 | 16 | 16 | 16 | KD with sequence 3 or 5 |
| | carcinoma | | | | | | does not increase |
| | | | | | | | sensitivity to cisplatin |
| GIST- | Gastrointestinal | 55 | 75 | 9 | 13 | 1 | KD with sequence 5 |
| T1 | Stromal | | | | | | increases sensitivity to |
| | | | | | | | cisplatin |
| TOV112D | Ovarian | 90 | 86 | 4 | 5 | 7 | KD with sequence 3 and 5 |
| | cancer | | | | | | does not increase |
| | | | | | | | sensitivity to cisplatin |
| COV362 | | 85 | 89 | 6.1 | 6.4 | 18 | KD with sequence 3 or 5 |
| | | | | | | | does not increase |
| | | | | | | | sensitivity to cisplatin |
| TC32 | Ewing's | 70 | 75 | 1.2 | 2.3 | 1.2 | KD with sequence 3 or 5 |
| | sarcoma | | | | | | does not increase |
| | | | | | | | sensitivity to cisplatin |
| TC71 | | 55 | 60 | 1.4 | 1.3 | 1.4 | KD with sequence 3 or 5 |
| | | | | | | | does not increase |
| | | | | | | | sensitivity to cisplatin |
| CHP212 | Neuroblastoma | 60 | 70 | 14.0 | 7.4 | 6.0 | KD with sequence 3 or 5 |
| | | | | | | | increases sensitivity to |
| | | | | | | | cisplatin |
| SKNAS | | 40 | 70 | 60 | 20 | 9 | KD with sequence 3 or 5 |
| | | | | | | | increases sensitivity to |
| | | | | | | | cisplatin |
| SH- | | 55 | 75 | 15.4 | 17.6 | 9.3 | KD with sequence 5 |
| SY5Y | | | | | | | increases sensitivity to |
| | | | | | | | cisplatin |
| KELLY | | 65 | 75 | 19.4 | 21.7 | 2.5 | KD with sequence 5 |
| | | | | | | | increases sensitivity to |
| | | | | | | | cisplatin |
| SK-N- | | 55 | 68 | 9 | 8 | 3 | KD with sequence 5 |
| BE2 | | | | | | | increases sensitivity to |
| | | | | | | | cisplatin |
| CHLA- | | 50 | 55 | 23 | 15 | 15 | KD with sequence 3 or 5 |
| 90 | | | | | | | increases sensitivity to |
| | | | | | | | cisplatin |
| CHL A- | | 25 | 35 | 24 | 11 | 6 | KD with sequence 3 or 5 |
| 136 | | | | | | | increases sensitivity to |
| | | | | | | | cisplatin |
| CHLA- | | 5 | 8 | 18 | 16 | 17 | KD with sequence 3 or 5 |
| 172 | | | | | | | does not increase |
| | | | | | | | sensitivity to cisplatin |

¹siRNA sequence #3 from Table 7
²siRNA sequence #5 from Table 7
³scrambled control siRNA
⁴KD; knockdown

### Example 6: Knockdown of GPC2 mRNA Results in an Increased Sensitivity to Carboplatin

[0292] GPC2 mRNA expression was reduced using the indicated siRNAs and changes in cell viability were assessed in multiple neuroblastoma cell lines. Cells were transfected with either a control siRNA or with GPC2 siRNA sequences 3, 5 or 7 from Table 7 using the RNAiMAX Lipofectamine kit (Invitrogen, Carlsbad, Calif.) as previously described in 96 wells for viability assays. Carboplatin was added at increasing concentrations (0 to 150 uM) to transfected cells at 24 hours post transfection. Following a 72 hour incubation period, viability measurements were made using Cell Titer Glo 2.0. Representative data for GPC2 knockdown with individual siRNAs generated from a separate experiment are shown in Table 10. As shown in Table 10 below, knockdown of GPC2 was associated with an increase in the sensitivity to carboplatin in several cell lines.

TABLE 10
Effect of siRNA mediated GPC2 knockdown on sensitivity to Carboplatin in
multiple cell lines

| Cell | Ctl¹ | siRNA #3² | | siRNA #5³ | | siRNA #7⁴ | | |
|---|---|---|---|---|---|---|---|---|
| Line | IC₅₀⁵ | % KD⁶ | IC₅₀⁵ | % KD⁶ | IC₅₀⁵ | % KD⁶ | IC₅₀⁵ | Data Summary |
| CHP212 | 23.19 | 60 | 19.89 | 70 | 10.41 | 70 | 8.14 | KD⁷ with sequence 3, 5 or 7 |
| | | | | | | | | increases sensitivity to |
| | | | | | | | | carboplatin |
| SKNAS | 220 | 40 | 40 | 70 | 15.3 | 64 | Not | KD with sequence 3 or 5 |
| | | | | | | | tested | increases sensitivity to |
| | | | | | | | | carboplatin |
| SH- | 1.89 | 55 | 2.3 | 75 | 1.55 | 70 | 0.47 | KD with sequence 5 or 7 |
| SY5Y | | | | | | | | increases sensitivity to |
| | | | | | | | | carboplatin |
| KELLY | 13 | 65 | 12 | 75 | 9 | 73 | Not | KD with sequence 5 increases |
| | | | | | | | tested | sensitivity to carboplatin |
| SK-N- | 30.99 | 55 | 27.9 | 68 | 11 | 69 | 2.5 | KD with sequence 3, 5 or 7 |
| BE2 | | | | | | | | increases sensitivity to |
| | | | | | | | | carboplatin |
| CHLA- | 150 | 50 | 100 | 55 | 100 | 65 | 15 | KD with sequence 3, 5 or 7 |
| 90 | | | | | | | | increases sensitivity to |
| | | | | | | | | carboplatin |
| CHLA- | 31 | 25 | 47 | 35 | 36 | 30 | Not | KD with sequence 3 or 5, does |
| 136 | | | | | | | tested | not increase sensitivity to |
| | | | | | | | | carboplatin |
| CHLA- | 110 | 5 | 100 | 8 | 100 | 20 | Not | KD with sequence 3 or 5 |
| 172 | | | | | | | tested | increases sensitivity to |
| | | | | | | | | carboplatin |

¹Ctl; scrambled control siRNA
²siRNA #3; siRNA with sequence 3 from Table 7
³siRNA #5; siRNA with sequence 5 from Table 7
⁴siRNA #7; siRNA with sequence 7 from Table 7
⁵IC₅₀; carboplatin IC₅₀ in cells transfected with the control siRNA or GPC2 siRNAs, as indicated, in μM
⁶% KD; percent GPC2 mRNA reduction (knockdown) observed with the indicated siRNA, compared to scrambled siRNA control
⁷KD; knockdown

### Example 7: Knockdown of GPC2 mRNA Results in an Increased Sensitivity to Cyclophosphamide

[0293] GPC2 mRNA expression was reduced with the indicated siRNAs and changes in cell viability were assessed in multiple neuroblastoma cell lines. Cells were transfected with either a control siRNA or with GPC2 siRNA sequences 3, 5 or 7 from Table 7 using the RNAiMAX Lipofectamine kit (Invitrogen, Carlsbad, Calif.) as previously described in 96 wells for viability assays. Cyclophosphamide was added at increasing concentrations (0-20 uM) to transfected cells at 24 hr post transfection. Following a 72 hour incubation period, viability measurements were made using Cell Titer Glo 2.0. Representative data for GPC2 knockdown with individual siRNAs generated from a separate experiment are shown in Table 11. As shown in Table 11 below, knockdown of GPC2 mRNA was associated with an increase in the sensitivity to Cyclophosphamide in several cell lines.

TABLE 11
Effect of siRNA mediated GPC2 knockdown on sensitivity to
Cyclophosphamide in multiple cell lines

| | Ctl¹ | siRNA #3² | | siRNA #5³ | | siRNA #7⁴ | | |
|---|---|---|---|---|---|---|---|---|
| Cell | IC₅₀ | % | IC₅₀ | % | IC₅₀ | % | IC₅₀ | |
| Line | (μM)⁵ | KD⁶ | (μM)⁵ | KD⁶ | (μM)⁵ | KD⁶ | (μM)⁵ | Data Summary |
| CHP212 | 1.36 | 60 | 0.87 | 70 | 0.45 | 70 | 1.2 | KD⁷ with sequence 3, 5 or 7 |
| | | | | | | | | increases sensitivity to |
| | | | | | | | | cyclophosphamide |
| SKNAS | 12 | 40 | 1.37 | 70 | 0.48 | 64 | Not | KD with sequence 3 or 5 |
| | | | | | | | tested | increases sensitivity to |
| | | | | | | | | cyclophosphamide |
| SH- | 2 | 55 | 1.5 | 75 | 0.3 | 70 | 0.94 | KD with sequence 3, 5 or 7 |
| SY5Y | | | | | | | | increases sensitivity to |
| | | | | | | | | cyclophosphamide |
| KELLY | 10 | 65 | 8 | 75 | 1 | 73 | Not | KD with sequence 3 or 5 |
| | | | | | | | tested | increases sensitivity to |
| | | | | | | | | cyclophosphamide |
| SK-N- | 4.17 | 55 | 2.41 | 68 | 1.8 | 69 | 0.41 | KD with sequence 3, 5 or 7 |
| BE2 | | | | | | | | increases sensitivity to |
| | | | | | | | | cyclophosphamide |
| CHLA- | 30 | 50 | 30 | 55 | 20 | 65 | 10 | KD with sequence 5 or 7 |
| 90 | | | | | | | | increases sensitivity to |
| | | | | | | | | cyclophosphamide |
| CHLA- | 6 | 25 | 11 | 35 | 5 | 30 | Not | KD sequence 3 or 5 does |
| 136 | | | | | | | tested | not increase sensitivity to |
| | | | | | | | | cyclophosphamide |
| CHLA- | 15 | 5 | 10 | 8 | 10 | 20 | Not | KD with sequence 3 or 5 |
| 172 | | | | | | | tested | increases sensitivity to |
| | | | | | | | | cyclophosphamide |

¹Ctl; scrambled control siRNA
²siRNA #3; siRNA with sequence 3 from Table 7
³siRNA #5; siRNA with sequence 5 from Table 7
⁴siRNA #7; siRNA with sequence 7 from Table 7
⁵IC₅₀ (μM); Cyclophosphamide IC₅₀ in microMolar concentration (μM), in cells transfected with the control siRNA or GPC2 siRNAs, as indicated
⁶% KD; percent GPC2 mRNA reduction (knockdown) observed with the indicated siRNA
⁷KD; knockdown

### Example 8: Knockdown of GPC2 mRNA Results in an Increased Sensitivity to Doxorubicin

[0294] GPC2 mRNA expression was reduced and changes in cell viability were assessed in multiple neuroblastoma cell lines. Cells were transfected with either a control siRNA or with GPC-2 siRNA sequences 3, 5 or 7 from Table 7 using the RNAiMAX Lipofectamine kit (Invitrogen, Carlsbad, Calif.) as previously described in 96 wells for viability assays. Doxorubicin was added at increasing concentrations (0-5 uM) to transfected cells at 24 hours post transfection. Following a 72 hour incubation period, viability measurements were made using Cell Titer Glo. Representative data for GPC2 knockdown with individual siRNAs generated from a separate experiment are shown in Table 12. As shown in Table 12 below, knockdown of GPC2 was associated with an increase in the sensitivity to Doxorubicin in several cell lines.

TABLE 12
Effect of siRNA mediated GPC2 knockdown on sensitivity to
Cyclophosphamide in multiple cell lines

| | Ctl¹ | siRNA #3² | | siRNA #5³ | | siRNA #7⁴ | | |
|---|---|---|---|---|---|---|---|---|
| Cell | IC₅₀ | % | IC₅₀ | % | IC₅₀ | % | IC₅₀ | |
| Line | (μM)⁵ | KD⁶ | (μM)⁵ | KD⁶ | (μM)⁵ | KD⁶ | (μM)⁵ | Data Summary |
| CHP212 | 0.03 | 60 | 0.03 | 70 | 0.02 | 70 | 0.02 | KD7 with sequence 3, 5 or 7 |
| | | | | | | | | does not increase sensitivity |
| | | | | | | | | to doxorubicin |
| SKNAS | 0.14 | 40 | 0.04 | 70 | 0.02 | 64 | Not | KD with sequence 3 or 5 |
| | | | | | | | tested | increases sensitivity to |
| | | | | | | | | doxorubicin |
| SH- | 0.06 | 55 | 0.08 | 75 | 0.05 | 70 | 0.03 | KD with sequence 7 increases |
| SY5Y | | | | | | | | sensitivity to doxorubicin |
| KELLY | 0.07 | 65 | 0.07 | 75 | 0.06 | 73 | Not | KD with sequence 3 or 5 does |
| | | | | | | | tested | not increase sensitivity to |
| | | | | | | | | doxorubicin |
| SK-N- | 1 | 55 | 1 | 68 | 0.02 | 69 | 0.2 | KD with sequence 5 or 7 |
| BE2 | | | | | | | | increases sensitivity to |
| | | | | | | | | doxorubicin |
| CHLA- | 0.36 | 50 | 0.35 | 55 | 0.25 | 65 | 0.13 | KD with sequence 5 or 7 |
| 90 | | | | | | | | increases sensitivity to |
| | | | | | | | | doxorubicin |
| CHLA- | 0.14 | 25 | 0.17 | 35 | 0.08 | 30 | Not | KD with sequence 5 increases |
| 136 | | | | | | | tested | sensitivity to doxorubicin |
| CHLA- | 2 | 5 | 2 | 8 | 0.9 | 20 | Not | KD with sequence 5 increases |
| 172 | | | | | | | tested | sensitivity to doxorubicin |

¹Ctl; scrambled control siRNA
²siRNA #3; siRNA with sequence 3 from Table 7
³siRNA #5; siRNA with sequence 5 from Table 7
⁴siRNA #7; siRNA with sequence 7 from Table 7
⁵IC₅₀ (μM); Doxorubicin IC₅₀ in microMolar concentration (μM), in cells transfected with the control siRNA or GPC2 siRNAs, as indicated
⁶% KD; percent GPC2 mRNA reduction (knockdown) observed with the indicated siRNA
⁷KD; knockdown

### Example 9: Knockdown of GPC2 mRNA Results in an Increased Sensitivity to Etoposide

[0295] GPC2 mRNA expression was reduced and changes in cell viability were assessed in multiple neuroblastoma cell lines. Cells were transfected with either a control siRNA or with GPC2 siRNA sequences 3, 5 or 7 from Table 7 using the RNAiMAX Lipofectamine kit (Invitrogen, Carlsbad, Calif.) as previously described in 96 wells for viability assays. Etoposide was added at increasing concentrations (0-15 uM) to transfected cells at 24 hours post transfection. Following a 72 hour incubation period, viability measurement were made using Cell Titer Glo 2.0. Representative data for GPC2 knockdown with individual siRNAs generated from a separate experiment are shown in Table 13. As shown in Table 13, knockdown of GPC2 was associated with an increase in the sensitivity to Etoposide in several cell lines.

TABLE 13
Effect of siRNA mediated GPC2 knockdown on sensitivity to Etoposide in
multiple cell lines

| | Ctl¹ | siRNA #3² | | siRNA #5³ | | siRNA #7⁴ | | |
|---|---|---|---|---|---|---|---|---|
| Cell | IC₅₀ | % | IC₅₀ | % | IC₅₀ | % | IC₅₀ | |
| Line | (μM)⁵ | KD⁶ | (μM)⁵ | KD⁶ | (μM)⁵ | KD⁶ | (μM)⁵ | Data Summary |
| CHP212 | 0.03 | 60 | 0.03 | 70 | 0.02 | 70 | 0.02 | Knockdown with sequence 5 |
| | | | | | | | | increases sensitivity to etoposide |
| SKNAS | 0.14 | 40 | 0.04 | 70 | 0.02 | 64 | Not | Knockdown with sequence 3 or 5 |
| | | | | | | | tested | increases sensitivity to etoposide |
| SH- | 0.06 | 55 | 0.08 | 75 | 0.05 | 70 | 0.03 | Knockdown with sequence 3, 5 or |
| SY5Y | | | | | | | | 7 increases sensitivity to etoposide |
| KELLY | 0.07 | 65 | 0.07 | 75 | 0.06 | 73 | Not | Knockdown with sequence 3 or 5 |
| | | | | | | | tested | increases sensitivity to etoposide |
| SK-N- | 1 | 55 | 1 | 68 | 0.02 | 69 | 0.2 | Knockdown with sequence 3, 5 or |
| BE2 | | | | | | | | 7 increases sensitivity to etoposide |
| CHLA- | 0.36 | 50 | 0.35 | 55 | 0.25 | 65 | 0.13 | Knockdown with sequence 5 or 7 |
| 90 | | | | | | | | increases sensitivity to etoposide |
| CHLA- | 0.14 | 25 | 0.17 | 35 | 0.08 | 30 | Not | Knockdown with sequence 3 |
| 136 | | | | | | | tested | increases sensitivity to etoposide |
| CHLA- | 2 | 5 | 2 | 8 | 0.9 | 20 | Not | Knockdown with sequence 3 or 5 |
| 172 | | | | | | | tested | increases sensitivity to etoposide |

¹Ctl; scrambled control siRNA
²siRNA #3; siRNA with sequence 3 from Table 7
³siRNA #5; siRNA with sequence 5 from Table 7
⁴siRNA #7; siRNA with sequence 7 from Table 7
⁵IC₅₀ (μM); Etoposide IC₅₀ in microMolar concentration (μM), in cells transfected with the control siRNA or GPC2 siRNAs, as indicated
⁶% KD; percent GPC2 mRNA reduction (knockdown) observed with the indicated siRNA

### Example 10: Knockdown of GPC2 mRNA Results in an Increased Sensitivity to Topotecan

[0296] GPC2 mRNA expression was reduced and changes in cell viability were assessed in multiple neuroblastoma cell lines. Cells were transfected with either a control siRNA or with GPC2 siRNA sequences 5 or 7 from Table 7 using the RNAiMAX Lipofectamine kit (Invitrogen, Carlsbad, Calif.) as previously described in 96 wells for viability assays. Topotecan was added at increasing concentrations (0-5 uM) to transfected cells at 24 hours post transfection. Following a 72 hour incubation period, viability measurements were made using Cell Titer Glo 2.0. Representative data for GPC2 knockdown with individual siRNAs generated from a separate experiment are shown in Table 14. As shown in Table 14, knockdown of GPC2 was associated with an increase in the sensitivity to Topotecan in several cell lines.

TABLE 14
Effect of siRNA mediated GPC2 knockdown on sensitivity to Topotecan in
multiple cell lines

| | Control | | | | | |
|---|---|---|---|---|---|---|
| | siRNA | siRNA #5¹ | | siRNA #7² | | |
| Cell | IC₅₀ | % | IC₅₀ | % | IC₅₀ | |
| Line | (μM)³ | KD⁴ | (μM)³ | KD⁴ | (μM)³ | Data Summary |
| CHP212 | 0.02 | 70 | 0.01 | 70 | 0.01 | Knockdown with sequence 5 or 7 does |
| | | | | | | not increase sensitivity to topotecan |
| SKNAS | 1.42 | 70 | 0.02 | 64 | 0.02 | Knockdown with sequence 5 or 7 |
| | | | | | | increases sensitivity to topotecan |
| SH- | 0.05 | 75 | 0.04 | 70 | 0.04 | Knockdown with sequence 5 or 7 does |
| SY5Y | | | | | | not increase sensitivity to topotecan |
| KELLY | 0.03 | 75 | 0.06 | 73 | 0.02 | Knockdown with sequence 5 or 7 does |
| | | | | | | not increase sensitivity to topotecan |
| SK-N- | 0.02 | 68 | 0.01 | 69 | 0.01 | Knockdown with sequence 5 or 7 does |
| BE2 | | | | | | not increase sensitivity to topotecan |
| CHLA- | 0.03 | 55 | 0.11 | 65 | 0.14 | Knockdown with sequence 5 or 7 does |
| 90 | | | | | | not increase sensitivity to topotecan |

¹siRNA #5; siRNA with sequence 5 from Table 7
²siRNA #7; siRNA with sequence 7 from Table 7
³IC₅₀ (μM); Etoposide IC₅₀ in microMolar concentration (μM), in cells transfected with the control siRNA or GPC2 siRNAs, as indicated
⁴% KD; percent GPC2 mRNA reduction (knockdown) observed with the indicated siRNA

### Example 11: Knockdown of GPC2 mRNA Affects Tumor Spheroid Formation

[0297] The effect of GPC2 knockdown on tumor spheroid formation was assessed. CHP212, SKNAS, SKNBE2 or CHLA90 neuroblastoma cells were transfected with either a scrambled control siRNA or with a GPC2 siRNA of sequence 5 from Table 7 using the RNAiMAX Lipofectamine kit (Invitrogen, Carlsbad, Calif.), as previously described. Following transfection, cells were plated in a low attachment 96 well plate for spheroid formation while under siRNA treatment. At 96 hours following transfection, spheroid images were taken using the Evos FL microscope ((Life Technologies, Carlsbad, Calif.) at 100× magnification. As shown in FIG. 6, cells that exhibited the highest degree of GPC2 mRNA knockdown showed the greatest inhibition in their ability to form spheroids.

[0298] The effect of siRNA mediated GPC2 mRNA knockdown was also assessed on established spheroid cultures. Spheroids were established by seeding cells in low attachment plates and culturing for 96 hours. Spheroids were transfected with either a scrambled control siRNA or with GPC2 siRNA of sequence 5 or 7 from Table 7, using the RNAiMAX Lipofectamine kit (Invitrogen, Carlsbad, Calif.) as previously described. At the 96 hour time point following transfection, the degree of GPC2 mRNA knockdown (FIG. 7A) as well as spheroid viability (FIG. 7B) was measured. As shown in FIGS. 7A and 7B, where GPC2 knockdown was observed, a decrease in spheroid viability was also seen.

[0299] Testing the effect of GPC2 mRNA knockdown on spheroids showed similar cytotoxicity to that seen in two dimensional cultures. GPC2 knockdown not only inhibited the formation of tumor spheroids, it also decreased cell viability after spheroids had already formed. This suggests that targeting this pathway may affect both established primary tumors as well as formation of new metastatic lesions.

The application's sequence listing, which the Patent Office published only in electronic form, follows.

SEQUENCE LISTING (5392 sequences)

SEQ ID NO: 1 - protein, 2546 aa, Homo sapiens
GCTCCCATTGTCTCGGCAGATGCCGCCTGGTCCAGCTATCGTGCTCGGTATTCAGTTTTCCGGAGCAGCGCTCTTTCTCTGGCCCGCGGAGCGGTCCCGCGGCCGAGTACCGGATTCCCGAGTTTGGGAGGCTCTGCTTTCCTCCTTAGGACCCACTTTGCCGTCCTGGGGTGGCTGCAGTTATGTCCGCGCTGCGACCTCTCCTGCTTCTGCTGCTGCCTCTGTGTCCCGGTCCTGGTCCCGGACCCGGGAGCGAGGCAAAGGTCACCCGGAGTTGTGCAGAGACCCGGCAGGTGCTGGGGGCCCGGGGATATAGCTTAAACCTAATCCCTCCCGCCCTGATCTCAGGTGAGCACCTCCGGGTCTGTCCCCAGGAGTACACCTGCTGTTCCAGTGAGACAGAGCAGAGGCTGATCAGGGAGACTGAGGCCACCTTCCGAGGCCTGGTGGAGGACAGCGGCTCCTTTCTGGTTCACACACTGGCTGCCAGGCACAGAAAATTTGATGAGTTTTTTCTGGAGATGCTCTCAGTAGCCCAGCACTCTCTGACCCAGCTCTTCTCCCACTCCTACGGCCGCCTGTATGCCCAGCACGCCCTCATATTCAATGGCCTGTTCTCTCGGCTGCGAGACTTCTATGGGGAATCTGGTGAGGGGTTGGATGACACCCTGGCGGATTTCTGGGCACAGCTCCTGGAGAGAGTGTTCCCGCTGCTGCACCCACAGTACAGCTTCCCCCCTGACTACCTGCTCTGCCTCTCACGCTTGGCCTCATCTACCGATGGCTCTCTGCAGCCCTTTGGGGACTCACCCCGCCGCCTCCGCCTGCAGATAACCCGGACCCTGGTGGCTGCCCGAGCCTTTGTGCAGGGCCTGGAGACTGGAAGAAATGTGGTCAGCGAAGCGCTTAAGGTGCCGGTGTCTGAAGGCTGCAGCCAGGCTCTGATGCGTCTCATCGGCTGTCCCCTGTGCCGGGGGGTCCCCTCACTTATGCCCTGCCAGGGCTTCTGCCTCAACGTGGTTCGTGGCTGTCTCAGCAGCAGGGGACTGGAGCCTGACTGGGGCAACTATCTGGATGGTCTCCTGATCCTGGCTGATAAGCTCCAGGGCCCCTTTTCCTTTGAGCTGACGGCCGAGTCCATTGGGGTGAAGATCTCGGAGGGTTTGATGTACCTGCAGGAAAACAGTGCGAAGGTGTCCGCCCAGGTGTTTCAGGAGTGCGGCCCCCCCGACCCGGTGCCTGCCCGCAACCGTCGAGCCCCGCCGCCCCGGGAAGAGGCGGGCCGGCTGTGGTCGATGGTGACCGAGGAGGAGCGGCCCACGACGGCCGCAGGCACCAACCTGCACCGGCTGGTGTGGGAGCTCCGCGAGCGTCTGGCCCGGATGCGGGGCTTCTGGGCCCGGCTGTCCCTGACGGTGTGCGGAGACTCTCGCATGGCAGCGGACGCCTCGCTGGAGGCGGCGCCCTGCTGGACCGGAGCCGGGCGGGGCCGGTACTTGCCGCCAGTGGTCGGGGGCTCCCCGGCCGAGCAGGTCAACAACCCCGAGCTCAAGGTGGACGCCTCGGGCCCCGATGTCCCGACACGGCGGCGTCGGCTACAGCTCCGGGCGGCCACGGCCAGAATGAAAACGGCCGCACTGGGACACGACCTGGACGGGCAGGACGCGGATGAGGATGCCAGCGGCTCTGGAGGGGGACAGCAGTATGCAGATGACTGGATGGCTGGGGCTGTGGCTCCCCCAGCCCGGCCTCCTCGGCCTCCATACCCTCCTAGAAGGGATGGTTCTGGGGGCAAAGGAGGAGGTGGCAGTGCCCGCTACAACCAGGGCCGGAGCAGGAGTGGGGGGGCATCTATTGGTTTTCACACCCAAACCATCCTCATTCTCTCCCTCTCAGCCCTGGCCCTGCTTGGACCTCGATAACGGGGGAGGGGTGCCCTAGCATCAGAAGGGTTCATGGCCCTTTCCCCTCCTCCCCCCTCAGCTGGGCCTGGGGAGGAGTCGAAGGGGGCTGCAGAGAGGGTAGAGAAGGGACTTTGCAGGTGAATGGCTGGGGCCCCAAATCCAGGAGATTTTCATCAGAGGTGGGTGGGTGTTCACAATATTTATTTTTTCATTTGGTAATGGGAGGGGGGCCTGGGGGTATTTATTTAGGAGGGAGTGTGGTTTCCTTAGAAGGTATAGTCTCTAGCCCTCTAAGGCTGGGGCTGGTGATCAGCCCCAACAGAGAAAATGAGGAGTTTAGAGTTGCAGCTGGGGAAGGGGTTTGAAGGAAGTTGGAAGTGGGGAGGGGTGGGGGCATCTGGTCTCAGAAATGGACCAGCTGGATGCAGGGCAGGGGACTGAGGGTGCTTGAGTAGGATGTGAGACTTCATGGGCCTGGGTTCTGTTGAGTTTTTTCAGTATCAATTTCTTAAACCAAATTTTAAAAAAAACAAGGTGGGGGGGTGCTCATCTCGTGACCTCTGCCACCCACATCCTTCACAAACTCCATGTTTCAGTGTTTGAGTCCATGTTTATTCTGCAAATAAATGGTAATGTATTGGA

SEQ ID NO: 2 - protein, 2615 aa, Homo sapiens
ATTGGCGGGGCCCCGCCTCGGGCCCCGCCCCCTGTCCGGCTCCCCGCTCCCATTGTCTCGGCAGATGCCGCCTGGTCCAGCTATCGTGCTCGGTATTCAGTTTTCCGGAGCAGCGCTCTTTCTCTGGCCCGCGGAGCGGTCCCGCGGCCGAGTACCGGATTCCCGAGTTTGGGAGGCTCTGCTTTCCTCCTTAGGACCCACTTTGCCGTCCTGGGGTGGCTGCAGTTATGTCCGCGCTGCGACCTCTCCTGCTTCTGCTGCTGCCTCTGTGTCCCGGTCCTGGTCCCGGACCCGGGAGCGAGGCAAAGGTCACCCGGAGTTGTGCAGAGACCCGGCAGGTGCTGGGGGCCCGGGGATATAGCTTAAACCTAATCCCTCCCGCCCTGATCTCAGGTGAGCACCTCCGGGTCTGTCCCCAGGAGTACACCTGCTGTTCCAGTGAGACAGAGCAGAGGCTGATCAGGGAGACTGAGGCCACCTTCCGAGGCCTGGTGGAGGACAGCGGCTCCTTTCTGGTTCACACACTGGCTGCCAGGCACAGAAAATTTGATGAGTTTTTTCTGGAGATGCTCTCAGTAGCCCAGCACTCTCTGACCCAGCTCTTCTCCCACTCCTACGGCCGCCTGTATGCCCAGCACGCCCTCATATTCAATGGCCTGTTCTCTCGGCTGCGAGACTTCTATGGGGAATCTGGTGAGGGGTTGGATGACACCCTGGCGGATTTCTGGGCACAGCTCCTGGAGAGAGTGTTCCCGCTGCTGCACCCACAGTACAGCTTCCCCCCTGACTACCTGCTCTGCCTCTCACGCTTGGCCTCATCTACCGATGGCTCTCTGCAGCCCTTTGGGGACTCACCCCGCCGCCTCCGCCTGCAGATAACCCGGACCCTGGTGGCTGCCCGAGCCTTTGTGCAGGGCCTGGAGACTGGAAGAAATGTGGTCAGCGAAGCGCTTAAGGTGCCGGTGTCTGAAGGCTGCAGCCAGGCTCTGATGCGTCTCATCGGCTGTCCCCTGTGCCGGGGGGTCCCCTCACTTATGCCCTGCCAGGGCTTCTGCCTCAACGTGGTTCGTGGCTGTCTCAGCAGCAGGGGACTGGAGCCTGACTGGGGCAACTATCTGGATGGTCTCCTGATCCTGGCTGATAAGCTCCAGGGCCCCTTTTCCTTTGAGCTGACGGCCGAGTCCATTGGGGTGAAGATCTCGGAGGGTTTGATGTACCTGCAGGAAAACAGTGCGAAGGTGTCCGCCCAGGTGTTTCAGGAGTGCGGCCCCCCCGACCCGGTGCCTGCCCGCAACCGTCGAGCCCCGCCGCCCCGGGAAGAGGCGGGCCGGCTGTGGTCGATGGTGACCGAGGAGGAGCGGCCCACGACGGCCGCAGGCACCAACCTGCACCGGCTGGTGTGGGAGCTCCGCGAGCGTCTGGCCCGGATGCGGGGCTTCTGGGCCCGGCTGTCCCTGACGGTGTGCGGAGACTCTCGCATGGCAGCGGACGCCTCGCTGGAGGCGGCGCCCTGCTGGACCGGAGCCGGGCGGGGCCGGTACTTGCCGCCAGTGGTCGGGGGCTCCCCGGCCGAGCAGGTCAACAACCCCGAGCTCAAGGTGGACGCCTCGGGCCCCGATGTCCCGACACGGCGGCGTCGGCTACAGCTCCGGGCGGCCACGGCCAGAATGAAAACGGCCGCACTGGGACACGACCTGGACGGGCAGGACGCGGATGAGGATGCCAGCGGCTCTGGAGGGGGACAGCAGTATGCAGATGACTGGATGGCTGGGGCTGTGGCTCCCCCAGCCCGGCCTCCTCGGCCTCCATACCCTCCTAGAAGGGATGGTTCTGGGGGCAAAGGAGGAGGTGGCAGTGCCCGCTACAACCAGGGCCGGAGCAGGAGTGGGGGGGCATCTATTGGTTTTCACACCCAAACCATCCTCATTCTCTCCCTCTCAGCCCTGGCCCTGCTTGGACCTCGATAACGGGGGAGGGGTGCCCTAGCATCAGAAGGGTTCATGGCCCTTTCCCCTCCTCCCCCCTCAGCTGGGCCTGGGGAGGAGTCGAAGGGGGCTGCAGAGAGGGTAGAGAAGGGACTTTGCAGGTGAATGGCTGGGGCCCCAAATCCAGGAGATTTTCATCAGAGGTGGGTGGGTGTTCACAATATTTATTTTTTCATTTGGTAATGGGAGGGGGGCCTGGGGGTATTTATTTAGGAGGGAGTGTGGTTTCCTTAGAAGGTATAGTCTCTAGCCCTCTAAGGCTGGGGCTGGTGATCAGCCCCAACAGAGAAAATGAGGAGTTTAGAGTTGCAGCTGGGGAAGGGGTTTGAAGGAAGTTGGAAGTGGGGAGGGGTGGGGGCATCTGGTCTCAGAAATGGACCAGCTGGATGCAGGGCAGGGGACTGAGGGTGCTTGAGTAGGATGTGAGACTTCATGGGCCTGGGTTCTGTTGAGTTTTTTCAGTATCAATTTCTTAAACCAAATTTTAAAAAAAACAAGGTGGGGGGGTGCTCATCTCGTGACCTCTGCCACCCACATCCTTCACAAACTCCATGTTTCAGTGTTTGAGTCCATGTTTATTCTGCAAATAAATGGTAATGTATTGGAAAAAAAAAAAAAAAAAAAAAAAAA

SEQ ID NO: 3 - RNA, 19 nt, Homo sapiens
ccugcuuggaccucgauaa

SEQ ID NO: 4 - RNA, 19 nt, Homo sapiens
cucaguagcccagcacucu

SEQ ID NO: 5 - RNA, 19 nt, Homo sapiens
cuccuuucugguucacaca

SEQ ID NO: 6 - RNA, 19 nt, Homo sapiens
uuaucgagguccaagcagg

SEQ ID NO: 7 - RNA, 19 nt, Homo sapiens
agagugcugggcuacugag

SEQ ID NO: 8 - RNA, 19 nt, Homo sapiens
ugugugaaccagaaaggag

SEQ ID NO: 9 - RNA, 19 nt, Homo sapiens
cuccugauccuggcugaua

SEQ ID NO: 10 - RNA, 19 nt, Homo sapiens
uaucagccaggaucaggag

SEQ ID NO: 11 - RNA, 19 nt, Homo sapiens
cucaucuaccgauggcucu

SEQ ID NO: 12 - RNA, 19 nt, Homo sapiens
agagccaucgguagaugag

SEQ ID NO: 13 - RNA, 19 nt, Homo sapiens
gugguucguggcugucuca

SEQ ID NO: 14 - RNA, 19 nt, Homo sapiens
ugagacagccacgaaccac

SEQ ID NO: 15 - RNA, 19 nt, Homo sapiens
cugcuguuccagugagaca

SEQ ID NO: 16 - RNA, 19 nt, Homo sapiens
ugucucacuggaacagcag

SEQ ID NO: 17 - RNA, 19 nt, Homo sapiens
gagugugguuuccuuagaa

SEQ ID NO: 18 - RNA, 19 nt, Homo sapiens
uucuaaggaaaccacacuc

SEQ ID NO: 19 - RNA, 19 nt, Homo sapiens
gaguacaccugcuguucca

SEQ ID NO: 20 - RNA, 19 nt, Homo sapiens
uggaacagcagguguacuc

SEQ ID NO: 21 - RNA, 19 nt, Homo sapiens
gacacgaccuggacgggca

SEQ ID NO: 22 - RNA, 19 nt, Homo sapiens
ugcccguccaggucguguc

SEQ ID NO: 23 - RNA, 19 nt, Homo sapiens
cugacuaccugcucugccu

SEQ ID NO: 24 - RNA, 19 nt, Homo sapiens
aggcagagcagguagucag

SEQ ID NO: 25 - RNA, 19 nt, Homo sapiens
gcgcuuaaggugccggugu

SEQ ID NO: 26 - RNA, 19 nt, Homo sapiens
acaccggcaccuuaagcgc

SEQ ID NO: 27 - RNA, 19 nt, Homo sapiens
ccuuugagcugacggccga

SEQ ID NO: 28 - RNA, 19 nt, Homo sapiens
ucggccgucagcucaaagg

SEQ ID NO: 29 - RNA, 19 nt, Homo sapiens
ccugcuucugcugcugccu

SEQ ID NO: 30 - RNA, 19 nt, Homo sapiens
aggcagcagcagaagcagg

SEQ ID NO: 31 - RNA, 19 nt, Homo sapiens
gaagaaauguggucagcga

SEQ ID NO: 32 - RNA, 19 nt, Homo sapiens
ucgcugaccacauuucuuc

SEQ ID NO: 33 - RNA, 19 nt, Homo sapiens
ggcuccuuucugguucaca

SEQ ID NO: 34 - RNA, 19 nt, Homo sapiens
ugugaaccagaaaggagcc

SEQ ID NO: 35 - RNA, 19 nt, Homo sapiens
gccuggagacuggaagaaa

SEQ ID NO: 36 - RNA, 19 nt, Homo sapiens
uuucuuccagucuccaggc

SEQ ID NO: 37 - RNA, 19 nt, Homo sapiens
gcaacuaucuggauggucu

SEQ ID NO: 38 - RNA, 19 nt, Homo sapiens
agaccauccagauaguugc

SEQ ID NO: 39 - RNA, 19 nt, Homo sapiens
gacugagggugcuugagua

SEQ ID NO: 40 - RNA, 19 nt, Homo sapiens
uacucaagcacccucaguc

SEQ ID NO: 41 - RNA, 19 nt, Homo sapiens
gugcuugaguaggauguga

SEQ ID NO: 42 - RNA, 19 nt, Homo sapiens
ucacauccuacucaagcac

SEQ ID NO: 43 - RNA, 19 nt, Homo sapiens
gcuugaguaggaugugaga

SEQ ID NO: 44 - RNA, 19 nt, Homo sapiens
ucucacauccuacucaagc

SEQ ID NO: 45 - RNA, 19 nt, Homo sapiens
guaggaugugagacuucau

SEQ ID NO: 46 - RNA, 19 nt, Homo sapiens
augaagucucacauccuac

SEQ ID NO: 47 - RNA, 19 nt, Homo sapiens
ccuccuuaggacccacuuu

SEQ ID NO: 48 - RNA, 19 nt, Homo sapiens
aaaguggguccuaaggagg

SEQ ID NO: 49 - RNA, 19 nt, Homo sapiens
gcugcgaccucuccugcuu

SEQ ID NO: 50 - RNA, 19 nt, Homo sapiens
aagcaggagaggucgcagc

SEQ ID NO: 51 - RNA, 19 nt, Homo sapiens
gcacgcccucauauucaau

SEQ ID NO: 52 - RNA, 19 nt, Homo sapiens
auugaauaugagggcgugc

SEQ ID NO: 53 - RNA, 19 nt, Homo sapiens
ggaugacacccuggcggau

SEQ ID NO: 54 - RNA, 19 nt, Homo sapiens
auccgccagggugucaucc

SEQ ID NO: 55 - RNA, 19 nt, Homo sapiens
ccuggagacuggaagaaau

SEQ ID NO: 56 - RNA, 19 nt, Homo sapiens
auuucuuccagucuccagg

SEQ ID NO: 57 - RNA, 19 nt, Homo sapiens
gccagggcuucugccucaa

SEQ ID NO: 58 - RNA, 19 nt, Homo sapiens
uugaggcagaagcccuggc

SEQ ID NO: 59 - RNA, 19 nt, Homo sapiens
gcugacggccgaguccauu

SEQ ID NO: 60 - RNA, 19 nt, Homo sapiens
aauggacucggccgucagc

SEQ ID NO: 61 - RNA, 19 nt, Homo sapiens
cccuagcaucagaaggguu

SEQ ID NO: 62 - RNA, 19 nt, Homo sapiens
aacccuucugaugcuaggg

SEQ ID NO: 63 - RNA, 19 nt, Homo sapiens
ccacccacauccuucacaa

SEQ ID NO: 64 - RNA, 19 nt, Homo sapiens
uugugaaggaugugggugg

SEQ ID NO: 65 - RNA, 19 nt, Homo sapiens
ccauguuuauucugcaaau

SEQ ID NO: 66 - RNA, 19 nt, Homo sapiens
auuugcagaauaaacaugg

SEQ ID NO: 67 - RNA, 20 nt, Homo sapiens
gcuaucgugcucgguauuca

SEQ ID NO: 68 - RNA, 20 nt, Homo sapiens
ugaauaccgagcacgauagc

SEQ ID NO: 69 - RNA, 20 nt, Homo sapiens
aucgugcucgguauucaguu

SEQ ID NO: 70 - RNA, 20 nt, Homo sapiens
aacugaauaccgagcacgau

SEQ ID NO: 71 - RNA, 20 nt, Homo sapiens
gcucugcuuuccuccuuagg

SEQ ID NO: 72 - RNA, 20 nt, Homo sapiens
ccuaaggaggaaagcagagc

SEQ ID NO: 73 - RNA, 20 nt, Homo sapiens
gcuucugcugcugccucugu

SEQ ID NO: 74 - RNA, 20 nt, Homo sapiens
acagaggcagcagcagaagc

SEQ ID NO: 75 - RNA, 20 nt, Homo sapiens
gggagcgaggcaaaggucac

SEQ ID NO: 76 - RNA, 20 nt, Homo sapiens
gugaccuuugccucgcuccc

SEQ ID NO: 77 - RNA, 20 nt, Homo sapiens
gcaaaggucacccggaguug

SEQ ID NO: 78 - RNA, 20 nt, Homo sapiens
caacuccgggugaccuuugc

SEQ ID NO: 79 - RNA, 20 nt, Homo sapiens
gggauauagcuuaaaccuaa

SEQ ID NO: 80 - RNA, 20 nt, Homo sapiens
uuagguuuaagcuauauccc

SEQ ID NO: 81 - RNA, 20 nt, Homo sapiens
ggauauagcuuaaaccuaau

SEQ ID NO: 82 - RNA, 20 nt, Homo sapiens
auuagguuuaagcuauaucc

SEQ ID NO: 83 - RNA, 20 nt, Homo sapiens
gugagcaccuccgggucugu

SEQ ID NO: 84 - RNA, 20 nt, Homo sapiens
acagacccggaggugcucac

SEQ ID NO: 85 - RNA, 20 nt, Homo sapiens
gagcaccuccgggucugucc

SEQ ID NO: 86 - RNA, 20 nt, Homo sapiens
ggacagacccggaggugcuc

SEQ ID NO: 87 - RNA, 20 nt, Homo sapiens
gggucuguccccaggaguac

SEQ ID NO: 88 - RNA, 20 nt, Homo sapiens
guacuccuggggacagaccc

SEQ ID NO: 89 - RNA, 20 nt, Homo sapiens
ggucuguccccaggaguaca

SEQ ID NO: 90 - RNA, 20 nt, Homo sapiens
uguacuccuggggacagacc

SEQ ID NO: 91 - RNA, 20 nt, Homo sapiens
gucuguccccaggaguacac

SEQ ID NO: 92 - RNA, 20 nt, Homo sapiens
guguacuccuggggacagac

SEQ ID NO: 93 - RNA, 20 nt, Homo sapiens
gcggcuccuuucugguucac

SEQ ID NO: 94 - RNA, 20 nt, Homo sapiens
gugaaccagaaaggagccgc

SEQ ID NO: 95 - RNA, 20 nt, Homo sapiens
ggcuccuuucugguucacac

SEQ ID NO: 96 - RNA, 20 nt, Homo sapiens
gugugaaccagaaaggagcc

SEQ ID NO: 97 - RNA, 20 nt, Homo sapiens
gcucuucucccacuccuacg

SEQ ID NO: 98 - RNA, 20 nt, Homo sapiens
cguaggagugggagaagagc

SEQ ID NO: 99 - RNA, 20 nt, Homo sapiens
gcccagcacgcccucauauu

SEQ ID NO: 100 - RNA, 20 nt, Homo sapiens
aauaugagggcgugcugggc

SEQ ID NO: 101 - RNA, 20 nt, Homo sapiens
gcacgcccucauauucaaug

SEQ ID NO: 102 - RNA, 20 nt, Homo sapiens
cauugaauaugagggcgugc

SEQ ID NO: 103 - RNA, 20 nt, Homo sapiens
gcugcugcacccacaguaca

SEQ ID NO: 104 - RNA, 20 nt, Homo sapiens
uguacugugggugcagcagc

SEQ ID NO: 105 - RNA, 20 nt, Homo sapiens
ggccuggagacuggaagaaa

SEQ ID NO: 106 - RNA, 20 nt, Homo sapiens
uuucuuccagucuccaggcc

SEQ ID NO: 107 - RNA, 20 nt, Homo sapiens
gccuggagacuggaagaaau

SEQ ID NO: 108 - RNA, 20 nt, Homo sapiens
auuucuuccagucuccaggc

SEQ ID NO: 109 - RNA, 20 nt, Homo sapiens
gcuuaaggugccggugucug

SEQ ID NO: 110 - RNA, 20 nt, Homo sapiens
cagacaccggcaccuuaagc

SEQ ID NO: 111 - RNA, 20 nt, Homo sapiens
ggcaacuaucuggauggucu

SEQ ID NO: 112 - RNA, 20 nt, Homo sapiens
agaccauccagauaguugcc

SEQ ID NO: 113 - RNA, 20 nt, Homo sapiens
gcaacuaucuggauggucuc

SEQ ID NO: 114 - RNA, 20 nt, Homo sapiens
gagaccauccagauaguugc

SEQ ID NO: 115 - RNA, 20 nt, Homo sapiens
ggaaaacagugcgaaggugu

SEQ ID NO: 116 - RNA, 20 nt, Homo sapiens
acaccuucgcacuguuuucc

SEQ ID NO: 117 - RNA, 20 nt, Homo sapiens
gaaaacagugcgaagguguc

SEQ ID NO: 118 - RNA, 20 nt, Homo sapiens
gacaccuucgcacuguuuuc

SEQ ID NO: 119 - RNA, 20 nt, Homo sapiens
ggacagcaguaugcagauga

SEQ ID NO: 120 - RNA, 20 nt, Homo sapiens
ucaucugcauacugcugucc

SEQ ID NO: 121 - RNA, 20 nt, Homo sapiens
gacagcaguaugcagaugac

SEQ ID NO: 122 - RNA, 20 nt, Homo sapiens
gucaucugcauacugcuguc

SEQ ID NO: 123 - RNA, 20 nt, Homo sapiens
acagcaguaugcagaugacu

SEQ ID NO: 124 - RNA, 20 nt, Homo sapiens
agucaucugcauacugcugu

SEQ ID NO: 125 - RNA, 20 nt, Homo sapiens
gccuccucggccuccauacc

SEQ ID NO: 126 - RNA, 20 nt, Homo sapiens
gguauggaggccgaggaggc

SEQ ID NO: 127 - RNA, 20 nt, Homo sapiens
ggccuccauacccuccuaga

SEQ ID NO: 128 - RNA, 20 nt, Homo sapiens
ucuaggaggguauggaggcc

SEQ ID NO: 129 - RNA, 20 nt, Homo sapiens
gccuccauacccuccuagaa

SEQ ID NO: 130 - RNA, 20 nt, Homo sapiens
uucuaggaggguauggaggc

SEQ ID NO: 131 - RNA, 20 nt, Homo sapiens
acccaaaccauccucauucu

SEQ ID NO: 132 - RNA, 20 nt, Homo sapiens
agaaugaggaugguuugggu

SEQ ID NO: 133 - RNA, 20 nt, Homo sapiens
gggugcccuagcaucagaag

SEQ ID NO: 134 - RNA, 19 nt, Homo sapiens
uucugaugcuagggcaccc

SEQ ID NO: 135 - RNA, 20 nt, Homo sapiens
gggcugcagagaggguagag

SEQ ID NO: 136 - RNA, 20 nt, Homo sapiens
cucuacccucucugcagccc

SEQ ID NO: 137 - RNA, 20 nt, Homo sapiens
ggcugcagagaggguagaga

SEQ ID NO: 138 - RNA, 20 nt, Homo sapiens
ucucuacccucucugcagcc

SEQ ID NO: 139 - RNA, 20 nt, Homo sapiens
gcugcagagaggguagagaa

SEQ ID NO: 140 - RNA, 20 nt, Homo sapiens
uucucuacccucucugcagc

SEQ ID NO: 141 - RNA, 20 nt, Homo sapiens
gaggguagagaagggacuuu

SEQ ID NO: 142 - RNA, 20 nt, Homo sapiens
aaagucccuucucuacccuc

SEQ ID NO: 143 - RNA, 20 nt, Homo sapiens
auuuauuuaggagggagugu

SEQ ID NO: 144 - RNA, 20 nt, Homo sapiens
acacucccuccuaaauaaau

SEQ ID NO: 145 - RNA, 20 nt, Homo sapiens
ggugaucagccccaacagag

SEQ ID NO: 146 - RNA, 20 nt, Homo sapiens
cucuguuggggcugaucacc

SEQ ID NO: 147 - RNA, 20 nt, Homo sapiens
agccccaacagagaaaauga

SEQ ID NO: 148 - RNA, 20 nt, Homo sapiens
ucauuuucucuguuggggcu

SEQ ID NO: 149 - RNA, 20 nt, Homo sapiens
gccccaacagagaaaaugag

SEQ ID NO: 150 - RNA, 20 nt, Homo sapiens
cucauuuucucuguuggggc

SEQ ID NO: 151 - RNA, 20 nt, Homo sapiens
aacagagaaaaugaggaguu

SEQ ID NO: 152 - RNA, 20 nt, Homo sapiens
aacuccucauuuucucuguu

SEQ ID NO: 153 - RNA, 20 nt, Homo sapiens
gagaaaaugaggaguuuaga

SEQ ID NO: 154 - RNA, 20 nt, Homo sapiens
ucuaaacuccucauuuucuc

SEQ ID NO: 155 - RNA, 20 nt, Homo sapiens
gaaaaugaggaguuuagagu

SEQ ID NO: 156 - RNA, 20 nt, Homo sapiens
acucuaaacuccucauuuuc

SEQ ID NO: 157 - RNA, 20 nt, Homo sapiens
aaaaugaggaguuuagaguu

SEQ ID NO: 158 - RNA, 20 nt, Homo sapiens
aacucuaaacuccucauuuu

SEQ ID NO: 159 - RNA, 20 nt, Homo sapiens
gggacugagggugcuugagu

SEQ ID NO: 160 - RNA, 20 nt, Homo sapiens
acucaagcacccucaguccc

SEQ ID NO: 161 - RNA, 20 nt, Homo sapiens
ggacugagggugcuugagua

SEQ ID NO: 162 - RNA, 20 nt, Homo sapiens
uacucaagcacccucagucc

SEQ ID NO: 163 - RNA, 20 nt, Homo sapiens
gacugagggugcuugaguag

SEQ ID NO: 164 - RNA, 20 nt, Homo sapiens
cuacucaagcacccucaguc

SEQ ID NO: 165 - RNA, 20 nt, Homo sapiens
ggugcuugaguaggauguga

SEQ ID NO: 166 - RNA, 20 nt, Homo sapiens
ucacauccuacucaagcacc

SEQ ID NO: 167 - RNA, 20 nt, Homo sapiens
gugcuugaguaggaugugag

SEQ ID NO: 168 - RNA, 20 nt, Homo sapiens
cucacauccuacucaagcac

SEQ ID NO: 169 - RNA, 20 nt, Homo sapiens
gcuugaguaggaugugagac

SEQ ID NO: 170 - RNA, 20 nt, Homo sapiens
gucucacauccuacucaagc

SEQ ID NO: 171 - RNA, 20 nt, Homo sapiens
guaggaugugagacuucaug

SEQ ID NO: 172 - RNA, 20 nt, Homo sapiens
caugaagucucacauccuac

SEQ ID NO: 173 - RNA, 20 nt, Homo sapiens
gggugcucaucucgugaccu

SEQ ID NO: 174 - RNA, 20 nt, Homo sapiens
aggucacgagaugagcaccc

SEQ ID NO: 175 - RNA, 20 nt, Homo sapiens
ggugcucaucucgugaccuc

SEQ ID NO: 176 - RNA, 20 nt, Homo sapiens
gaggucacgagaugagcacc

SEQ ID NO: 177 - RNA, 20 nt, Homo sapiens
gugcucaucucgugaccucu

SEQ ID NO: 178 - RNA, 20 nt, Homo sapiens
agaggucacgagaugagcac

SEQ ID NO: 179 - RNA, 20 nt, Homo sapiens
gccacccacauccuucacaa

SEQ ID NO: 180 - RNA, 20 nt, Homo sapiens
uugugaaggauguggguggc

SEQ ID NO: 181 - RNA, 20 nt, Homo sapiens
acccacauccuucacaaacu

SEQ ID NO: 182 - RNA, 20 nt, Homo sapiens
aguuugugaaggaugugggu

SEQ ID NO: 183 - RNA, 20 nt, Homo sapiens
gcaaauaaaugguaauguau

SEQ ID NO: 184 - RNA, 20 nt, Homo sapiens
auacauuaccauuuauuugc

SEQ ID NO: 185 - RNA, 21 nt, Homo sapiens
gggauauagcuuaaaccuaau

SEQ ID NO: 186 - RNA, 21 nt, Homo sapiens
auuagguuuaagcuauauccc

SEQ ID NO: 187 - RNA, 21 nt, Homo sapiens
ggccuggagacuggaagaaau

SEQ ID NO: 188 - RNA, 21 nt, Homo sapiens
auuucuuccagucuccaggcc

SEQ ID NO: 189 - RNA, 21 nt, Homo sapiens
gggcaacuaucuggauggucu

SEQ ID NO: 190 - RNA, 21 nt, Homo sapiens
agaccauccagauaguugccc

SEQ ID NO: 191 - RNA, 21 nt, Homo sapiens
gggacagcaguaugcagauga

SEQ ID NO: 192 - RNA, 21 nt, Homo sapiens
ucaucugcauacugcuguccc

SEQ ID NO: 193 - RNA, 21 nt, Homo sapiens
gacagcaguaugcagaugacu

SEQ ID NO: 194 - RNA, 21 nt, Homo sapiens
agucaucugcauacugcuguc

SEQ ID NO: 195 - RNA, 21 nt, Homo sapiens
gggugcuugaguaggauguga

SEQ ID NO: 196 - RNA, 21 nt, Homo sapiens
ucacauccuacucaagcaccc

SEQ ID NO: 197 - RNA, 21 nt, Homo sapiens
gugcuugaguaggaugugaga

SEQ ID NO: 198 - RNA, 21 nt, Homo sapiens
ucucacauccuacucaagcac

SEQ ID NO: 199 - RNA, 21 nt, Homo sapiens
gcuugaguaggaugugagacu

SEQ ID NO: 200 - RNA, 21 nt, Homo sapiens
agucucacauccuacucaagc

SEQ ID NO: 201 - RNA, 21 nt, Homo sapiens
gccacccacauccuucacaaa

SEQ ID NO: 202 - RNA, 21 nt, Homo sapiens
uuugugaaggauguggguggc

SEQ ID NO: 203 - RNA, 21 nt, Homo sapiens
  misc_feature (20)..(21): n is thymine
cuccugauccuggcugauann

SEQ ID NO: 204 - RNA, 21 nt, Homo sapiens
  misc_feature (20)..(21): n is thymine
uaucagccaggaucaggagnn

SEQ ID NO: 205 - RNA, 21 nt, Homo sapiens
  misc_feature (20)..(21): n is thymine
cucaucuaccgauggcucunn

SEQ ID NO: 206 - RNA, 21 nt, Homo sapiens
  misc_feature (20)..(21): n is thymine
agagccaucgguagaugagnn

SEQ ID NO: 207 - RNA, 21 nt, Homo sapiens
  misc_feature (20)..(21): n is thymine
ccugcuuggaccucgauaann

SEQ ID NO: 208 - RNA, 21 nt, Homo sapiens
  misc_feature (20)..(21): n is thymine
uuaucgagguccaagcaggnn

SEQ ID NO: 209 - RNA, 21 nt, Homo sapiens
  misc_feature (20)..(21): n is thymine
gugguucguggcugucucann

SEQ ID NO: 210 - RNA, 21 nt, Homo sapiens
  misc_feature (20)..(21): n is thymine
ugagacagccacgaaccacnn

SEQ ID NO: 211 - RNA, 21 nt, Homo sapiens
  misc_feature (20)..(21): n is thymine
cucaguagcccagcacucunn

SEQ ID NO: 212 - RNA, 21 nt, Homo sapiens
  misc_feature (20)..(21): n is thymine
agagugcugggcuacugagnn

SEQ ID NO: 213 - RNA, 21 nt, Homo sapiens
  misc_feature (20)..(21): n is thymine
cugcuguuccagugagacann

SEQ ID NO: 214 - RNA, 21 nt, Homo sapiens
  misc_feature (20)..(21): n is thymine
ugucucacuggaacagcagnn

SEQ ID NO: 215 - RNA, 21 nt, Homo sapiens
  misc_feature (20)..(21): n is thymine
cuccuuucugguucacacann

SEQ ID NO: 216 - RNA, 21 nt, Homo sapiens
  misc_feature (20)..(21): n is thymine
ugugugaaccagaaaggagnn

SEQ ID NO: 217 - RNA, 21 nt, Homo sapiens
  misc_feature (20)..(21): n is thymine
gagugugguuuccuuagaann

SEQ ID NO: 218 - RNA, 21 nt, Homo sapiens
  misc_feature (20)..(21): n is thymine
uucuaaggaaaccacacucnn

SEQ ID NO: 219 - RNA, 21 nt, Homo sapiens
  misc_feature (20)..(21): n is thymine
gaguacaccugcuguuccann

SEQ ID NO: 220 - RNA, 21 nt, Homo sapiens
  misc_feature (20)..(21): n is thymine
uggaacagcagguguacucnn

SEQ ID NO: 221 - RNA, 21 nt, Homo sapiens
  misc_feature (20)..(21): n is thymine
gacacgaccuggacgggcann

SEQ ID NO: 222 - RNA, 21 nt, Homo sapiens
  misc_feature (20)..(21): n is thymine
ugcccguccaggucgugucnn

SEQ ID NO: 223 - RNA, 21 nt, Homo sapiens
  misc_feature (20)..(21): n is thymine
cugacuaccugcucugccunn

SEQ ID NO: 224 - RNA, 21 nt, Homo sapiens
  misc_feature (20)..(21): n is thymine
aggcagagcagguagucagnn

SEQ ID NO: 225 - RNA, 21 nt, Homo sapiens
  misc_feature (20)..(21): n is thymine
gcgcuuaaggugccggugunn

SEQ ID NO: 226 - RNA, 21 nt, Homo sapiens
  misc_feature (20)..(21): n is thymine
acaccggcaccuuaagcgcnn

SEQ ID NO: 227 - RNA, 21 nt, Homo sapiens
  misc_feature (20)..(21): n is thymine
ccuuugagcugacggccgann

SEQ ID NO: 228 - RNA, 21 nt, Homo sapiens
  misc_feature (20)..(21): n is thymine
ucggccgucagcucaaaggnn

SEQ ID NO: 229 - RNA, 21 nt, Homo sapiens
  misc_feature (20)..(21): n is thymine
ccugcuucugcugcugccunn

SEQ ID NO: 230 - RNA, 21 nt, Homo sapiens
  misc_feature (20)..(21): n is thymine
aggcagcagcagaagcaggnn

SEQ ID NO: 231 - RNA, 21 nt, Homo sapiens
  misc_feature (20)..(21): n is thymine
gaagaaauguggucagcgann

SEQ ID NO: 232 - RNA, 21 nt, Homo sapiens
  misc_feature (20)..(21): n is thymine
ucgcugaccacauuucuucnn

SEQ ID NO: 233 - RNA, 21 nt, Homo sapiens
ucccauugucucggcagaugc

SEQ ID NO: 234 - RNA, 21 nt, Homo sapiens
cccauugucucggcagaugcc

SEQ ID NO: 235 - RNA, 21 nt, Homo sapiens
ccauugucucggcagaugccg

SEQ ID NO: 236 - RNA, 21 nt, Homo sapiens
cauugucucggcagaugccgc

SEQ ID NO: 237 - RNA, 21 nt, Homo sapiens
auugucucggcagaugccgcc

SEQ ID NO: 238 - RNA, 21 nt, Homo sapiens
uugucucggcagaugccgccu

SEQ ID NO: 239 - RNA, 21 nt, Homo sapiens
ugucucggcagaugccgccug

SEQ ID NO: 240 - RNA, 21 nt, Homo sapiens
gucucggcagaugccgccugg

SEQ ID NO: 241 - RNA, 21 nt, Homo sapiens
ucucggcagaugccgccuggu

SEQ ID NO: 242 - RNA, 21 nt, Homo sapiens
cucggcagaugccgccugguc

SEQ ID NO: 243 - RNA, 21 nt, Homo sapiens
ucggcagaugccgccuggucc

SEQ ID NO: 244 - RNA, 21 nt, Homo sapiens
cggcagaugccgccuggucca

SEQ ID NO: 245 - RNA, 21 nt, Homo sapiens
ggcagaugccgccugguccag

SEQ ID NO: 246 - RNA, 21 nt, Homo sapiens
gcagaugccgccugguccagc

SEQ ID NO: 247 - RNA, 21 nt, Homo sapiens
cagaugccgccugguccagcu

SEQ ID NO: 248 - RNA, 21 nt, Homo sapiens
agaugccgccugguccagcua

SEQ ID NO: 249 - RNA, 21 nt, Homo sapiens
gaugccgccugguccagcuau

SEQ ID NO: 250 - RNA, 21 nt, Homo sapiens
augccgccugguccagcuauc

SEQ ID NO: 251 - RNA, 21 nt, Homo sapiens
ugccgccugguccagcuaucg

SEQ ID NO: 252 - RNA, 21 nt, Homo sapiens
gccgccugguccagcuaucgu

SEQ ID NO: 253 - RNA, 21 nt, Homo sapiens
ccgccugguccagcuaucgug

SEQ ID NO: 254 - RNA, 21 nt, Homo sapiens
cgccugguccagcuaucgugc

SEQ ID NO: 255 - RNA, 21 nt, Homo sapiens
gccugguccagcuaucgugcu

SEQ ID NO: 256 - RNA, 21 nt, Homo sapiens
ccugguccagcuaucgugcuc

SEQ ID NO: 257 - RNA, 21 nt, Homo sapiens
cugguccagcuaucgugcucg

SEQ ID NO: 258 - RNA, 21 nt, Homo sapiens
ugguccagcuaucgugcucgg

SEQ ID NO: 259 - RNA, 21 nt, Homo sapiens
gguccagcuaucgugcucggu

SEQ ID NO: 260 - RNA, 21 nt, Homo sapiens
guccagcuaucgugcucggua

SEQ ID NO: 261 - RNA, 21 nt, Homo sapiens
uccagcuaucgugcucgguau

SEQ ID NO: 262 - RNA, 21 nt, Homo sapiens
ccagcuaucgugcucgguauu

SEQ ID NO: 263 - RNA, 21 nt, Homo sapiens
cagcuaucgugcucgguauuc

SEQ ID NO: 264 - RNA, 21 nt, Homo sapiens
agcuaucgugcucgguauuca

SEQ ID NO: 265 - RNA, 21 nt, Homo sapiens
gcuaucgugcucgguauucag

SEQ ID NO: 266 - RNA, 21 nt, Homo sapiens
cuaucgugcucgguauucagu

SEQ ID NO: 267 - RNA, 21 nt, Homo sapiens
uaucgugcucgguauucaguu

SEQ ID NO: 268 - RNA, 21 nt, Homo sapiens
aucgugcucgguauucaguuu

SEQ ID NO: 269 - RNA, 21 nt, Homo sapiens
uuuccggagcagcgcucuuuc

SEQ ID NO: 270 - RNA, 21 nt, Homo sapiens
uuccggagcagcgcucuuucu

SEQ ID NO: 271 - RNA, 21 nt, Homo sapiens
uccggagcagcgcucuuucuc

SEQ ID NO: 272 - RNA, 21 nt, Homo sapiens
ccggagcagcgcucuuucucu

SEQ ID NO: 273 - RNA, 21 nt, Homo sapiens
cggagcagcgcucuuucucug

SEQ ID NO: 274 - RNA, 21 nt, Homo sapiens
ggagcagcgcucuuucucugg

SEQ ID NO: 275 - RNA, 21 nt, Homo sapiens
ggcccgcggagcggucccgcg

SEQ ID NO: 276 - RNA, 21 nt, Homo sapiens
gcccgcggagcggucccgcgg

SEQ ID NO: 277 - RNA, 21 nt, Homo sapiens
cccgcggagcggucccgcggc

SEQ ID NO: 278 - RNA, 21 nt, Homo sapiens
ccgcggagcggucccgcggcc

SEQ ID NO: 279 - RNA, 21 nt, Homo sapiens
cgcggagcggucccgcggccg

SEQ ID NO: 280 - RNA, 21 nt, Homo sapiens
gcggagcggucccgcggccga

SEQ ID NO: 281 - RNA, 21 nt, Homo sapiens
cggagcggucccgcggccgag

SEQ ID NO: 282 - RNA, 21 nt, Homo sapiens
ggagcggucccgcggccgagu

SEQ ID NO: 283 - RNA, 21 nt, Homo sapiens
gagcggucccgcggccgagua

SEQ ID NO: 284 - RNA, 21 nt, Homo sapiens
agcggucccgcggccgaguac

SEQ ID NO: 285 - RNA, 21 nt, Homo sapiens
gcggucccgcggccgaguacc

SEQ ID NO: 286 - RNA, 21 nt, Homo sapiens
cggucccgcggccgaguaccg

SEQ ID NO: 287 - RNA, 21 nt, Homo sapiens
ggucccgcggccgaguaccgg

SEQ ID NO: 288 - RNA, 21 nt, Homo sapiens
gucccgcggccgaguaccgga

SEQ ID NO: 289 - RNA, 21 nt, Homo sapiens
ucccgcggccgaguaccggau

SEQ ID NO: 290 - RNA, 21 nt, Homo sapiens
cccgcggccgaguaccggauu

SEQ ID NO: 291 - RNA, 21 nt, Homo sapiens
ccgcggccgaguaccggauuc

SEQ ID NO: 292 - RNA, 21 nt, Homo sapiens
cgcggccgaguaccggauucc

SEQ ID NO: 293 - RNA, 21 nt, Homo sapiens
gcggccgaguaccggauuccc

SEQ ID NO: 294 - RNA, 21 nt, Homo sapiens
cggccgaguaccggauucccg

SEQ ID NO: 295 - RNA, 21 nt, Homo sapiens
ggccgaguaccggauucccga

SEQ ID NO: 296 - RNA, 21 nt, Homo sapiens
gccgaguaccggauucccgag

SEQ ID NO: 297 - RNA, 21 nt, Homo sapiens
ccgaguaccggauucccgagu

SEQ ID NO: 298 - RNA, 21 nt, Homo sapiens
cgaguaccggauucccgaguu

SEQ ID NO: 299 - RNA, 21 nt, Homo sapiens
gaguaccggauucccgaguuu

SEQ ID NO: 300 - RNA, 21 nt, Homo sapiens
aguaccggauucccgaguuug

SEQ ID NO: 301 - RNA, 21 nt, Homo sapiens
guaccggauucccgaguuugg

SEQ ID NO: 302 - RNA, 21 nt, Homo sapiens
uaccggauucccgaguuuggg

SEQ ID NO: 303 - RNA, 21 nt, Homo sapiens
accggauucccgaguuuggga

SEQ ID NO: 304 - RNA, 21 nt, Homo sapiens
ccggauucccgaguuugggag

SEQ ID NO: 305 - RNA, 21 nt, Homo sapiens
cggauucccgaguuugggagg

SEQ ID NO: 306 - RNA, 21 nt, Homo sapiens
ggauucccgaguuugggaggc

SEQ ID NO: 307 - RNA, 21 nt, Homo sapiens
gauucccgaguuugggaggcu

SEQ ID NO: 308 - RNA, 21 nt, Homo sapiens
auucccgaguuugggaggcuc

SEQ ID NO: 309 - RNA, 21 nt, Homo sapiens
uucccgaguuugggaggcucu

SEQ ID NO: 310 - RNA, 21 nt, Homo sapiens
ucccgaguuugggaggcucug

SEQ ID NO: 311 - RNA, 21 nt, Homo sapiens
cccgaguuugggaggcucugc

SEQ ID NO: 312 - RNA, 21 nt, Homo sapiens
ccgaguuugggaggcucugcu

SEQ ID NO: 313 - RNA, 21 nt, Homo sapiens
cgaguuugggaggcucugcuu

SEQ ID NO: 314 - RNA, 21 nt, Homo sapiens
gaguuugggaggcucugcuuu

SEQ ID NO: 315 - RNA, 21 nt, Homo sapiens
aguuugggaggcucugcuuuc

SEQ ID NO: 316 - RNA, 21 nt, Homo sapiens
guuugggaggcucugcuuucc

SEQ ID NO: 317 - RNA, 21 nt, Homo sapiens
uuugggaggcucugcuuuccu

SEQ ID NO: 318 - RNA, 21 nt, Homo sapiens
uugggaggcucugcuuuccuc

SEQ ID NO: 319 - RNA, 21 nt, Homo sapiens
ugggaggcucugcuuuccucc

SEQ ID NO: 320 - RNA, 21 nt, Homo sapiens
gggaggcucugcuuuccuccu

SEQ ID NO: 321 - RNA, 21 nt, Homo sapiens
ggaggcucugcuuuccuccuu

SEQ ID NO: 322 - RNA, 21 nt, Homo sapiens
gaggcucugcuuuccuccuua

SEQ ID NO: 323 - RNA, 21 nt, Homo sapiens
aggcucugcuuuccuccuuag

SEQ ID NO: 324 - RNA, 21 nt, Homo sapiens
ggcucugcuuuccuccuuagg

SEQ ID NO: 325 - RNA, 21 nt, Homo sapiens
gcucugcuuuccuccuuagga

SEQ ID NO: 326 - RNA, 21 nt, Homo sapiens
cucugcuuuccuccuuaggac

SEQ ID NO: 327 - RNA, 21 nt, Homo sapiens
ucugcuuuccuccuuaggacc

SEQ ID NO: 328 - RNA, 21 nt, Homo sapiens
cugcuuuccuccuuaggaccc

SEQ ID NO: 329 - RNA, 21 nt, Homo sapiens
ugcuuuccuccuuaggaccca

SEQ ID NO: 330 - RNA, 21 nt, Homo sapiens
gcuuuccuccuuaggacccac

SEQ ID NO: 331 - RNA, 21 nt, Homo sapiens
cuuuccuccuuaggacccacu

SEQ ID NO: 332 - RNA, 21 nt, Homo sapiens
uuuccuccuuaggacccacuu

SEQ ID NO: 333 - RNA, 21 nt, Homo sapiens
uuccuccuuaggacccacuuu

SEQ ID NO: 334 - RNA, 21 nt, Homo sapiens
uccuccuuaggacccacuuug

SEQ ID NO: 335 - RNA, 21 nt, Homo sapiens
ccuccuuaggacccacuuugc

SEQ ID NO: 336 - RNA, 21 nt, Homo sapiens
cuccuuaggacccacuuugcc

SEQ ID NO: 337 - RNA, 21 nt, Homo sapiens
uccuuaggacccacuuugccg

SEQ ID NO: 338 - RNA, 21 nt, Homo sapiens
ccuuaggacccacuuugccgu

SEQ ID NO: 339 - RNA, 21 nt, Homo sapiens
cuuaggacccacuuugccguc

SEQ ID NO: 340 - RNA, 21 nt, Homo sapiens
uuaggacccacuuugccgucc

SEQ ID NO: 341 - RNA, 21 nt, Homo sapiens
uaggacccacuuugccguccu

SEQ ID NO: 342 - RNA, 21 nt, Homo sapiens
aggacccacuuugccguccug

SEQ ID NO: 343 - RNA, 21 nt, Homo sapiens
ggacccacuuugccguccugg

SEQ ID NO: 344 - RNA, 21 nt, Homo sapiens
gacccacuuugccguccuggg

SEQ ID NO: 345 - RNA, 21 nt, Homo sapiens
ggcugcaguuauguccgcgcu

SEQ ID NO: 346 - RNA, 21 nt, Homo sapiens
gcugcaguuauguccgcgcug

SEQ ID NO: 347 - RNA, 21 nt, Homo sapiens
cugcaguuauguccgcgcugc

SEQ ID NO: 348 - RNA, 21 nt, Homo sapiens
ugcaguuauguccgcgcugcg

SEQ ID NO: 349 - RNA, 21 nt, Homo sapiens
gcaguuauguccgcgcugcga

SEQ ID NO: 350 - RNA, 21 nt, Homo sapiens
caguuauguccgcgcugcgac

SEQ ID NO: 351 - RNA, 21 nt, Homo sapiens
aguuauguccgcgcugcgacc

SEQ ID NO: 352 - RNA, 21 nt, Homo sapiens
guuauguccgcgcugcgaccu

SEQ ID NO: 353 - RNA, 21 nt, Homo sapiens
uuauguccgcgcugcgaccuc

SEQ ID NO: 354 - RNA, 21 nt, Homo sapiens
uauguccgcgcugcgaccucu

SEQ ID NO: 355 - RNA, 21 nt, Homo sapiens
auguccgcgcugcgaccucuc

SEQ ID NO: 356 - RNA, 21 nt, Homo sapiens
uguccgcgcugcgaccucucc

SEQ ID NO: 357 - RNA, 21 nt, Homo sapiens
guccgcgcugcgaccucuccu

SEQ ID NO: 358 - RNA, 21 nt, Homo sapiens
uccgcgcugcgaccucuccug

SEQ ID NO: 359 - RNA, 21 nt, Homo sapiens
ccgcgcugcgaccucuccugc

SEQ ID NO: 360 - RNA, 21 nt, Homo sapiens
cgcgcugcgaccucuccugcu

SEQ ID NO: 361 - RNA, 21 nt, Homo sapiens
gcgcugcgaccucuccugcuu

SEQ ID NO: 362 - RNA, 21 nt, Homo sapiens
cgcugcgaccucuccugcuuc

SEQ ID NO: 363 - RNA, 21 nt, Homo sapiens
gcugcgaccucuccugcuucu

SEQ ID NO: 364 - RNA, 21 nt, Homo sapiens
cugcgaccucuccugcuucug

SEQ ID NO: 365 - RNA, 21 nt, Homo sapiens
ugcgaccucuccugcuucugc

SEQ ID NO: 366 - RNA, 21 nt, Homo sapiens
gcgaccucuccugcuucugcu

SEQ ID NO: 367 - RNA, 21 nt, Homo sapiens
cgaccucuccugcuucugcug

SEQ ID NO: 368 - RNA, 21 nt, Homo sapiens
gaccucuccugcuucugcugc

SEQ ID NO: 369 - RNA, 21 nt, Homo sapiens
accucuccugcuucugcugcu

SEQ ID NO: 370 - RNA, 21 nt, Homo sapiens
ccucuccugcuucugcugcug

SEQ ID NO: 371 - RNA, 21 nt, Homo sapiens
cucuccugcuucugcugcugc

SEQ ID NO: 372 - RNA, 21 nt, Homo sapiens
ucuccugcuucugcugcugcc

SEQ ID NO: 373 - RNA, 21 nt, Homo sapiens
cuccugcuucugcugcugccu

SEQ ID NO: 374 - RNA, 21 nt, Homo sapiens
uccugcuucugcugcugccuc

SEQ ID NO: 375 - RNA, 21 nt, Homo sapiens
ccugcuucugcugcugccucu

SEQ ID NO: 376 - RNA, 21 nt, Homo sapiens
cugcuucugcugcugccucug

SEQ ID NO: 377 - RNA, 21 nt, Homo sapiens
ugcuucugcugcugccucugu

SEQ ID NO: 378 - RNA, 21 nt, Homo sapiens
gcuucugcugcugccucugug

SEQ ID NO: 379 - RNA, 21 nt, Homo sapiens
cuucugcugcugccucugugu

SEQ ID NO: 380 - RNA, 21 nt, Homo sapiens
uucugcugcugccucuguguc

SEQ ID NO: 381 - RNA, 21 nt, Homo sapiens
ucugcugcugccucugugucc

SEQ ID NO: 382 - RNA, 21 nt, Homo sapiens
cugcugcugccucuguguccc

SEQ ID NO: 383 - RNA, 21 nt, Homo sapiens
ugcugcugccucugugucccg

SEQ ID NO: 384 - RNA, 21 nt, Homo sapiens
gcugcugccucugugucccgg

SEQ ID NO: 385 - RNA, 21 nt, Homo sapiens
cugcugccucugugucccggu

SEQ ID NO: 386 - RNA, 21 nt, Homo sapiens
ugcugccucugugucccgguc

SEQ ID NO: 387 - RNA, 21 nt, Homo sapiens
gcugccucugugucccggucc

SEQ ID NO: 388 - RNA, 21 nt, Homo sapiens
cugccucugugucccgguccu

SEQ ID NO: 389 - RNA, 21 nt, Homo sapiens
ugccucugugucccgguccug

SEQ ID NO: 390 - RNA, 21 nt, Homo sapiens
gccucugugucccgguccugg

SEQ ID NO: 391 - RNA, 21 nt, Homo sapiens
ccucugugucccgguccuggu

SEQ ID NO: 392 - RNA, 21 nt, Homo sapiens
cucugugucccgguccugguc

SEQ ID NO: 393 - RNA, 21 nt, Homo sapiens
ucugugucccgguccuggucc

SEQ ID NO: 394 - RNA, 21 nt, Homo sapiens
cugugucccgguccugguccc

SEQ ID NO: 395 - RNA, 21 nt, Homo sapiens
ugugucccgguccuggucccg

SEQ ID NO: 396 - RNA, 21 nt, Homo sapiens
gugucccgguccuggucccgg

SEQ ID NO: 397 - RNA, 21 nt, Homo sapiens
ugucccgguccuggucccgga

SEQ ID NO: 398 - RNA, 21 nt, Homo sapiens
gucccgguccuggucccggac

SEQ ID NO: 399 - RNA, 21 nt, Homo sapiens
ucccgguccuggucccggacc

SEQ ID NO: 400 - RNA, 21 nt, Homo sapiens
cccgguccuggucccggaccc

SEQ ID NO: 401 - RNA, 21 nt, Homo sapiens
ccgguccuggucccggacccg

SEQ ID NO: 402 - RNA, 21 nt, Homo sapiens
cgguccuggucccggacccgg

SEQ ID NO: 403 - RNA, 21 nt, Homo sapiens
gguccuggucccggacccggg

SEQ ID NO: 404 - RNA, 21 nt, Homo sapiens
guccuggucccggacccggga

SEQ ID NO: 405 - RNA, 21 nt, Homo sapiens
uccuggucccggacccgggag

SEQ ID NO: 406 - RNA, 21 nt, Homo sapiens
ccuggucccggacccgggagc

SEQ ID NO: 407 - RNA, 21 nt, Homo sapiens
cuggucccggacccgggagcg

SEQ ID NO: 408 - RNA, 21 nt, Homo sapiens
uggucccggacccgggagcga

SEQ ID NO: 409 - RNA, 21 nt, Homo sapiens
ggucccggacccgggagcgag

SEQ ID NO: 410 - RNA, 21 nt, Homo sapiens
gucccggacccgggagcgagg

SEQ ID NO: 411 - RNA, 21 nt, Homo sapiens
ucccggacccgggagcgaggc

SEQ ID NO: 412 - RNA, 21 nt, Homo sapiens
cccggacccgggagcgaggca

SEQ ID NO: 413 - RNA, 21 nt, Homo sapiens
ccggacccgggagcgaggcaa

SEQ ID NO: 414 - RNA, 21 nt, Homo sapiens
cggacccgggagcgaggcaaa

SEQ ID NO: 415 - RNA, 21 nt, Homo sapiens
ggacccgggagcgaggcaaag

SEQ ID NO: 416 - RNA, 21 nt, Homo sapiens
gacccgggagcgaggcaaagg

SEQ ID NO: 417 - RNA, 21 nt, Homo sapiens
acccgggagcgaggcaaaggu

SEQ ID NO: 418 - RNA, 21 nt, Homo sapiens
cccgggagcgaggcaaagguc

SEQ ID NO: 419 - RNA, 21 nt, Homo sapiens
ccgggagcgaggcaaagguca

SEQ ID NO: 420 - RNA, 21 nt, Homo sapiens
cgggagcgaggcaaaggucac

SEQ ID NO: 421 - RNA, 21 nt, Homo sapiens
gggagcgaggcaaaggucacc

SEQ ID NO: 422 - RNA, 21 nt, Homo sapiens
ggagcgaggcaaaggucaccc

SEQ ID NO: 423 - RNA, 21 nt, Homo sapiens
gagcgaggcaaaggucacccg

SEQ ID NO: 424 - RNA, 21 nt, Homo sapiens
agcgaggcaaaggucacccgg

SEQ ID NO: 425 - RNA, 21 nt, Homo sapiens
gcgaggcaaaggucacccgga

SEQ ID NO: 426 - RNA, 21 nt, Homo sapiens
cgaggcaaaggucacccggag

SEQ ID NO: 427 - RNA, 21 nt, Homo sapiens
gaggcaaaggucacccggagu

SEQ ID NO: 428 - RNA, 21 nt, Homo sapiens
aggcaaaggucacccggaguu

SEQ ID NO: 429 - RNA, 21 nt, Homo sapiens
ggcaaaggucacccggaguug

SEQ ID NO: 430 - RNA, 21 nt, Homo sapiens
gcaaaggucacccggaguugu

SEQ ID NO: 431 - RNA, 21 nt, Homo sapiens
caaaggucacccggaguugug

SEQ ID NO: 432 - RNA, 21 nt, Homo sapiens
aaaggucacccggaguugugc

SEQ ID NO: 433 - RNA, 21 nt, Homo sapiens
aaggucacccggaguugugca

SEQ ID NO: 434 - RNA, 21 nt, Homo sapiens
aggucacccggaguugugcag

SEQ ID NO: 435 - RNA, 21 nt, Homo sapiens
ggucacccggaguugugcaga

SEQ ID NO: 436 - RNA, 21 nt, Homo sapiens
gucacccggaguugugcagag

SEQ ID NO: 437 - RNA, 21 nt, Homo sapiens
ucacccggaguugugcagaga

SEQ ID NO: 438 - RNA, 21 nt, Homo sapiens
cacccggaguugugcagagac

SEQ ID NO: 439 - RNA, 21 nt, Homo sapiens
acccggaguugugcagagacc

SEQ ID NO: 440 - RNA, 21 nt, Homo sapiens
cccggaguugugcagagaccc

SEQ ID NO: 441 - RNA, 21 nt, Homo sapiens
ccggaguugugcagagacccg

SEQ ID NO: 442 - RNA, 21 nt, Homo sapiens
cggaguugugcagagacccgg

SEQ ID NO: 443 - RNA, 21 nt, Homo sapiens
ggaguugugcagagacccggc

SEQ ID NO: 444 - RNA, 21 nt, Homo sapiens
gaguugugcagagacccggca

SEQ ID NO: 445 - RNA, 21 nt, Homo sapiens
aguugugcagagacccggcag

SEQ ID NO: 446 - RNA, 21 nt, Homo sapiens
guugugcagagacccggcagg

SEQ ID NO: 447 - RNA, 21 nt, Homo sapiens
uugugcagagacccggcaggu

SEQ ID NO: 448 - RNA, 21 nt, Homo sapiens
ugugcagagacccggcaggug

SEQ ID NO: 449 - RNA, 21 nt, Homo sapiens
gugcagagacccggcaggugc

SEQ ID NO: 450 - RNA, 21 nt, Homo sapiens
ugcagagacccggcaggugcu

SEQ ID NO: 451 - RNA, 21 nt, Homo sapiens
gcagagacccggcaggugcug

SEQ ID NO: 452 - RNA, 21 nt, Homo sapiens
cagagacccggcaggugcugg

SEQ ID NO: 453 - RNA, 21 nt, Homo sapiens
agagacccggcaggugcuggg

SEQ ID NO: 454 - RNA, 21 nt, Homo sapiens
gggauauagcuuaaaccuaau

SEQ ID NO: 455 - RNA, 21 nt, Homo sapiens
ggauauagcuuaaaccuaauc

SEQ ID NO: 456 - RNA, 21 nt, Homo sapiens
gauauagcuuaaaccuaaucc

SEQ ID NO: 457 - RNA, 21 nt, Homo sapiens
auauagcuuaaaccuaauccc

SEQ ID NO: 458 - RNA, 21 nt, Homo sapiens
uauagcuuaaaccuaaucccu

SEQ ID NO: 459 - RNA, 21 nt, Homo sapiens
auagcuuaaaccuaaucccuc

SEQ ID NO: 460 - RNA, 21 nt, Homo sapiens
uagcuuaaaccuaaucccucc

SEQ ID NO: 461 - RNA, 21 nt, Homo sapiens
agcuuaaaccuaaucccuccc

SEQ ID NO: 462 - RNA, 21 nt, Homo sapiens
gcuuaaaccuaaucccucccg

SEQ ID NO: 463 - RNA, 21 nt, Homo sapiens
cuuaaaccuaaucccucccgc

SEQ ID NO: 464 - RNA, 21 nt, Homo sapiens
uuaaaccuaaucccucccgcc

SEQ ID NO: 465 - RNA, 21 nt, Homo sapiens
uaaaccuaaucccucccgccc

SEQ ID NO: 466 - RNA, 21 nt, Homo sapiens
aaaccuaaucccucccgcccu

SEQ ID NO: 467 - RNA, 21 nt, Homo sapiens
aaccuaaucccucccgcccug

SEQ ID NO: 468 - RNA, 21 nt, Homo sapiens
accuaaucccucccgcccuga

SEQ ID NO: 469 - RNA, 21 nt, Homo sapiens
ccuaaucccucccgcccugau

SEQ ID NO: 470 - RNA, 21 nt, Homo sapiens
cuaaucccucccgcccugauc

SEQ ID NO: 471 - RNA, 21 nt, Homo sapiens
uaaucccucccgcccugaucu

SEQ ID NO: 472 - RNA, 21 nt, Homo sapiens
aaucccucccgcccugaucuc

SEQ ID NO: 473 - RNA, 21 nt, Homo sapiens
aucccucccgcccugaucuca

SEQ ID NO: 474 - RNA, 21 nt, Homo sapiens
ucccucccgcccugaucucag

SEQ ID NO: 475 - RNA, 21 nt, Homo sapiens
cccucccgcccugaucucagg

SEQ ID NO: 476 - RNA, 21 nt, Homo sapiens
ccucccgcccugaucucaggu

SEQ ID NO: 477 - RNA, 21 nt, Homo sapiens
cucccgcccugaucucaggug

SEQ ID NO: 478 - RNA, 21 nt, Homo sapiens
ucccgcccugaucucagguga

SEQ ID NO: 479 - RNA, 21 nt, Homo sapiens
cccgcccugaucucaggugag

SEQ ID NO: 480 - RNA, 21 nt, Homo sapiens
ccgcccugaucucaggugagc

SEQ ID NO: 481 - RNA, 21 nt, Homo sapiens
cgcccugaucucaggugagca

SEQ ID NO: 482 - RNA, 21 nt, Homo sapiens
gcccugaucucaggugagcac

SEQ ID NO: 483 - RNA, 21 nt, Homo sapiens
cccugaucucaggugagcacc

SEQ ID NO: 484 - RNA, 21 nt, Homo sapiens
ccugaucucaggugagcaccu

SEQ ID NO: 485 - RNA, 21 nt, Homo sapiens
cugaucucaggugagcaccuc

SEQ ID NO: 486 - RNA, 21 nt, Homo sapiens
ugaucucaggugagcaccucc

SEQ ID NO: 487 - RNA, 21 nt, Homo sapiens
gaucucaggugagcaccuccg

SEQ ID NO: 488 - RNA, 21 nt, Homo sapiens
aucucaggugagcaccuccgg

SEQ ID NO: 489 - RNA, 21 nt, Homo sapiens
ucucaggugagcaccuccggg

SEQ ID NO: 490 - RNA, 21 nt, Homo sapiens
cucaggugagcaccuccgggu

SEQ ID NO: 491 - RNA, 21 nt, Homo sapiens
ucaggugagcaccuccggguc

SEQ ID NO: 492 - RNA, 21 nt, Homo sapiens
caggugagcaccuccgggucu

SEQ ID NO: 493 - RNA, 21 nt, Homo sapiens
aggugagcaccuccgggucug

SEQ ID NO: 494 - RNA, 21 nt, Homo sapiens
ggugagcaccuccgggucugu

SEQ ID NO: 495 - RNA, 21 nt, Homo sapiens
gugagcaccuccgggucuguc

SEQ ID NO: 496 - RNA, 21 nt, Homo sapiens
ugagcaccuccgggucugucc

SEQ ID NO: 497 - RNA, 21 nt, Homo sapiens
gagcaccuccgggucuguccc

SEQ ID NO: 498 - RNA, 21 nt, Homo sapiens
cccaggaguacaccugcuguu

SEQ ID NO: 499 - RNA, 21 nt, Homo sapiens
ccaggaguacaccugcuguuc

SEQ ID NO: 500 - RNA, 21 nt, Homo sapiens
caggaguacaccugcuguucc

SEQ ID NO: 501 - RNA, 21 nt, Homo sapiens
aggaguacaccugcuguucca

SEQ ID NO: 502 - RNA, 21 nt, Homo sapiens
ggaguacaccugcuguuccag

SEQ ID NO: 503 - RNA, 21 nt, Homo sapiens
gaguacaccugcuguuccagu

SEQ ID NO: 504 - RNA, 21 nt, Homo sapiens
aguacaccugcuguuccagug

SEQ ID NO: 505 - RNA, 21 nt, Homo sapiens
guacaccugcuguuccaguga

SEQ ID NO: 506 - RNA, 21 nt, Homo sapiens
uacaccugcuguuccagugag

SEQ ID NO: 507 - RNA, 21 nt, Homo sapiens
acaccugcuguuccagugaga

SEQ ID NO: 508 - RNA, 21 nt, Homo sapiens
caccugcuguuccagugagac

SEQ ID NO: 509 - RNA, 21 nt, Homo sapiens
accugcuguuccagugagaca

SEQ ID NO: 510 - RNA, 21 nt, Homo sapiens
ccugcuguuccagugagacag

SEQ ID NO: 511 - RNA, 21 nt, Homo sapiens
cugcuguuccagugagacaga

SEQ ID NO: 512 - RNA, 21 nt, Homo sapiens
ugcuguuccagugagacagag

SEQ ID NO: 513 - RNA, 21 nt, Homo sapiens
gcuguuccagugagacagagc

SEQ ID NO: 514 - RNA, 21 nt, Homo sapiens
cuguuccagugagacagagca

SEQ ID NO: 515 - RNA, 21 nt, Homo sapiens
uguuccagugagacagagcag

SEQ ID NO: 516 - RNA, 21 nt, Homo sapiens
guuccagugagacagagcaga

SEQ ID NO: 517 - RNA, 21 nt, Homo sapiens
uuccagugagacagagcagag

SEQ ID NO: 518 - RNA, 21 nt, Homo sapiens
uccagugagacagagcagagg

SEQ ID NO: 519 - RNA, 21 nt, Homo sapiens
ccagugagacagagcagaggc

SEQ ID NO: 520 - RNA, 21 nt, Homo sapiens
cagugagacagagcagaggcu

SEQ ID NO: 521 - RNA, 21 nt, Homo sapiens
agugagacagagcagaggcug

SEQ ID NO: 522 - RNA, 21 nt, Homo sapiens
gugagacagagcagaggcuga

SEQ ID NO: 523 - RNA, 21 nt, Homo sapiens
ugagacagagcagaggcugau

SEQ ID NO: 524 - RNA, 21 nt, Homo sapiens
gagacagagcagaggcugauc

SEQ ID NO: 525 - RNA, 21 nt, Homo sapiens
agacagagcagaggcugauca

SEQ ID NO: 526 - RNA, 21 nt, Homo sapiens
gacagagcagaggcugaucag

SEQ ID NO: 527 - RNA, 21 nt, Homo sapiens
acagagcagaggcugaucagg

SEQ ID NO: 528 - RNA, 21 nt, Homo sapiens
cagagcagaggcugaucaggg

SEQ ID NO: 529 - RNA, 21 nt, Homo sapiens
agagcagaggcugaucaggga

SEQ ID NO: 530 - RNA, 21 nt, Homo sapiens
gagcagaggcugaucagggag

SEQ ID NO: 531 - RNA, 21 nt, Homo sapiens
agcagaggcugaucagggaga

SEQ ID NO: 532 - RNA, 21 nt, Homo sapiens
gcagaggcugaucagggagac

SEQ ID NO: 533 - RNA, 21 nt, Homo sapiens
cagaggcugaucagggagacu

SEQ ID NO: 534 - RNA, 21 nt, Homo sapiens
agaggcugaucagggagacug

SEQ ID NO: 535 - RNA, 21 nt, Homo sapiens
gaggcugaucagggagacuga

SEQ ID NO: 536 - RNA, 21 nt, Homo sapiens
aggcugaucagggagacugag

SEQ ID NO: 537 - RNA, 21 nt, Homo sapiens
ggcugaucagggagacugagg

SEQ ID NO: 538 - RNA, 21 nt, Homo sapiens
gcugaucagggagacugaggc

SEQ ID NO: 539 - RNA, 21 nt, Homo sapiens
cugaucagggagacugaggcc

SEQ ID NO: 540 - RNA, 21 nt, Homo sapiens
ugaucagggagacugaggcca

SEQ ID NO: 541 - RNA, 21 nt, Homo sapiens
gaucagggagacugaggccac

SEQ ID NO: 542 - RNA, 21 nt, Homo sapiens
accuuccgaggccugguggag

SEQ ID NO: 543 - RNA, 21 nt, Homo sapiens
ccuuccgaggccugguggagg

SEQ ID NO: 544 - RNA, 21 nt, Homo sapiens
cuuccgaggccugguggagga

SEQ ID NO: 545 - RNA, 21 nt, Homo sapiens
uuccgaggccugguggaggac

SEQ ID NO: 546 - RNA, 21 nt, Homo sapiens
uccgaggccugguggaggaca

SEQ ID NO: 547 - RNA, 21 nt, Homo sapiens
ccgaggccugguggaggacag

SEQ ID NO: 548 - RNA, 21 nt, Homo sapiens
cgaggccugguggaggacagc

SEQ ID NO: 549 - RNA, 21 nt, Homo sapiens
gaggccugguggaggacagcg

SEQ ID NO: 550 - RNA, 21 nt, Homo sapiens
aggccugguggaggacagcgg

SEQ ID NO: 551 - RNA, 21 nt, Homo sapiens
ggccugguggaggacagcggc

SEQ ID NO: 552 - RNA, 21 nt, Homo sapiens
gccugguggaggacagcggcu

SEQ ID NO: 553 - RNA, 21 nt, Homo sapiens
ccugguggaggacagcggcuc

SEQ ID NO: 554 - RNA, 21 nt, Homo sapiens
cugguggaggacagcggcucc

SEQ ID NO: 555 - RNA, 21 nt, Homo sapiens
ugguggaggacagcggcuccu

SEQ ID NO: 556 - RNA, 21 nt, Homo sapiens
gguggaggacagcggcuccuu

SEQ ID NO: 557 - RNA, 21 nt, Homo sapiens
guggaggacagcggcuccuuu

SEQ ID NO: 558 - RNA, 21 nt, Homo sapiens
uggaggacagcggcuccuuuc

SEQ ID NO: 559 - RNA, 21 nt, Homo sapiens
ggaggacagcggcuccuuucu

SEQ ID NO: 560 - RNA, 21 nt, Homo sapiens
gaggacagcggcuccuuucug

SEQ ID NO: 561 - RNA, 21 nt, Homo sapiens
aggacagcggcuccuuucugg

SEQ ID NO: 562 - RNA, 21 nt, Homo sapiens
ggacagcggcuccuuucuggu

SEQ ID NO: 563 - RNA, 21 nt, Homo sapiens
gacagcggcuccuuucugguu

SEQ ID NO: 564 - RNA, 21 nt, Homo sapiens
acagcggcuccuuucugguuc

SEQ ID NO: 565 - RNA, 21 nt, Homo sapiens
cagcggcuccuuucugguuca

SEQ ID NO: 566 - RNA, 21 nt, Homo sapiens
agcggcuccuuucugguucac

SEQ ID NO: 567 - RNA, 21 nt, Homo sapiens
gcggcuccuuucugguucaca

SEQ ID NO: 568 - RNA, 21 nt, Homo sapiens
cggcuccuuucugguucacac

SEQ ID NO: 569 - RNA, 21 nt, Homo sapiens
ggcuccuuucugguucacaca

SEQ ID NO: 570 - RNA, 21 nt, Homo sapiens
gcuccuuucugguucacacac

SEQ ID NO: 571 - RNA, 21 nt, Homo sapiens
uuucuggagaugcucucagua

SEQ ID NO: 572 - RNA, 21 nt, Homo sapiens
uucuggagaugcucucaguag

SEQ ID NO: 573 - RNA, 21 nt, Homo sapiens
ucuggagaugcucucaguagc

SEQ ID NO: 574 - RNA, 21 nt, Homo sapiens
cuggagaugcucucaguagcc

SEQ ID NO: 575 - RNA, 21 nt, Homo sapiens
uggagaugcucucaguagccc

SEQ ID NO: 576 - RNA, 21 nt, Homo sapiens
ggagaugcucucaguagccca

SEQ ID NO: 577 - RNA, 21 nt, Homo sapiens
gagaugcucucaguagcccag

SEQ ID NO: 578 - RNA, 21 nt, Homo sapiens
agaugcucucaguagcccagc

SEQ ID NO: 579 - RNA, 21 nt, Homo sapiens
gaugcucucaguagcccagca

SEQ ID NO: 580 - RNA, 21 nt, Homo sapiens
augcucucaguagcccagcac

SEQ ID NO: 581 - RNA, 21 nt, Homo sapiens
ugcucucaguagcccagcacu

SEQ ID NO: 582 - RNA, 21 nt, Homo sapiens
gcucucaguagcccagcacuc

SEQ ID NO: 583 - RNA, 21 nt, Homo sapiens
cucucaguagcccagcacucu

SEQ ID NO: 584 - RNA, 21 nt, Homo sapiens
ucucaguagcccagcacucuc

SEQ ID NO: 585 - RNA, 21 nt, Homo sapiens
cucaguagcccagcacucucu

SEQ ID NO: 586 - RNA, 21 nt, Homo sapiens
ucaguagcccagcacucucug

SEQ ID NO: 587 - RNA, 21 nt, Homo sapiens
caguagcccagcacucucuga

SEQ ID NO: 588 - RNA, 21 nt, Homo sapiens
aguagcccagcacucucugac

SEQ ID NO: 589 - RNA, 21 nt, Homo sapiens
guagcccagcacucucugacc

SEQ ID NO: 590 - RNA, 21 nt, Homo sapiens
uagcccagcacucucugaccc

SEQ ID NO: 591 - RNA, 21 nt, Homo sapiens
agcccagcacucucugaccca

SEQ ID NO: 592 - RNA, 21 nt, Homo sapiens
gcccagcacucucugacccag

SEQ ID NO: 593 - RNA, 21 nt, Homo sapiens
cccagcacucucugacccagc

SEQ ID NO: 594 - RNA, 21 nt, Homo sapiens
ccagcacucucugacccagcu

SEQ ID NO: 595 - RNA, 21 nt, Homo sapiens
cagcacucucugacccagcuc

SEQ ID NO: 596 - RNA, 21 nt, Homo sapiens
agcacucucugacccagcucu

SEQ ID NO: 597 - RNA, 21 nt, Homo sapiens
gcacucucugacccagcucuu

SEQ ID NO: 598 - RNA, 21 nt, Homo sapiens
cacucucugacccagcucuuc

SEQ ID NO: 599 - RNA, 21 nt, Homo sapiens
acucucugacccagcucuucu

SEQ ID NO: 600 - RNA, 21 nt, Homo sapiens
cucucugacccagcucuucuc

SEQ ID NO: 601 - RNA, 21 nt, Homo sapiens
ucucugacccagcucuucucc

SEQ ID NO: 602 - RNA, 21 nt, Homo sapiens
cucugacccagcucuucuccc

SEQ ID NO: 603 - RNA, 21 nt, Homo sapiens
ucugacccagcucuucuccca

SEQ ID NO: 604 - RNA, 21 nt, Homo sapiens
cugacccagcucuucucccac

SEQ ID NO: 605 - RNA, 21 nt, Homo sapiens
ugacccagcucuucucccacu

SEQ ID NO: 606 - RNA, 21 nt, Homo sapiens
gacccagcucuucucccacuc

SEQ ID NO: 607 - RNA, 21 nt, Homo sapiens
acccagcucuucucccacucc

SEQ ID NO: 608 - RNA, 21 nt, Homo sapiens
cccagcucuucucccacuccu

SEQ ID NO: 609 - RNA, 21 nt, Homo sapiens
ccagcucuucucccacuccua

SEQ ID NO: 610 - RNA, 21 nt, Homo sapiens
cagcucuucucccacuccuac

SEQ ID NO: 611 - RNA, 21 nt, Homo sapiens
agcucuucucccacuccuacg

SEQ ID NO: 612 - RNA, 21 nt, Homo sapiens
gcucuucucccacuccuacgg

SEQ ID NO: 613 - RNA, 21 nt, Homo sapiens
cucuucucccacuccuacggc

SEQ ID NO: 614 - RNA, 21 nt, Homo sapiens
ucuucucccacuccuacggcc

SEQ ID NO: 615 - RNA, 21 nt, Homo sapiens
cuucucccacuccuacggccg

SEQ ID NO: 616 - RNA, 21 nt, Homo sapiens
uucucccacuccuacggccgc

SEQ ID NO: 617 - RNA, 21 nt, Homo sapiens
ucucccacuccuacggccgcc

SEQ ID NO: 618 - RNA, 21 nt, Homo sapiens
cucccacuccuacggccgccu

SEQ ID NO: 619 - RNA, 21 nt, Homo sapiens
ucccacuccuacggccgccug

SEQ ID NO: 620 - RNA, 21 nt, Homo sapiens
cccacuccuacggccgccugu

SEQ ID NO: 621 - RNA, 21 nt, Homo sapiens
ccacuccuacggccgccugua

SEQ ID NO: 622 - RNA, 21 nt, Homo sapiens
cacuccuacggccgccuguau

SEQ ID NO: 623 - RNA, 21 nt, Homo sapiens
acuccuacggccgccuguaug

SEQ ID NO: 624 - RNA, 21 nt, Homo sapiens
cuccuacggccgccuguaugc

SEQ ID NO: 625 - RNA, 21 nt, Homo sapiens
uccuacggccgccuguaugcc

SEQ ID NO: 626 - RNA, 21 nt, Homo sapiens
ccuacggccgccuguaugccc

SEQ ID NO: 627 - RNA, 21 nt, Homo sapiens
cuacggccgccuguaugccca

SEQ ID NO: 628 - RNA, 21 nt, Homo sapiens
uacggccgccuguaugcccag

SEQ ID NO: 629 - RNA, 21 nt, Homo sapiens
acggccgccuguaugcccagc

SEQ ID NO: 630 - RNA, 21 nt, Homo sapiens
cggccgccuguaugcccagca

SEQ ID NO: 631 - RNA, 21 nt, Homo sapiens
ggccgccuguaugcccagcac

SEQ ID NO: 632 - RNA, 21 nt, Homo sapiens
gccgccuguaugcccagcacg

SEQ ID NO: 633 - RNA, 21 nt, Homo sapiens
ccgccuguaugcccagcacgc

SEQ ID NO: 634 - RNA, 21 nt, Homo sapiens
cgccuguaugcccagcacgcc

SEQ ID NO: 635 - RNA, 21 nt, Homo sapiens
gccuguaugcccagcacgccc

SEQ ID NO: 636 - RNA, 21 nt, Homo sapiens
ccuguaugcccagcacgcccu

SEQ ID NO: 637 - RNA, 21 nt, Homo sapiens
cuguaugcccagcacgcccuc

SEQ ID NO: 638 - RNA, 21 nt, Homo sapiens
uguaugcccagcacgcccuca

SEQ ID NO: 639 - RNA, 21 nt, Homo sapiens
guaugcccagcacgcccucau

SEQ ID NO: 640 - RNA, 21 nt, Homo sapiens
uaugcccagcacgcccucaua

SEQ ID NO: 641 - RNA, 21 nt, Homo sapiens
augcccagcacgcccucauau

SEQ ID NO: 642 - RNA, 21 nt, Homo sapiens
ugcccagcacgcccucauauu

SEQ ID NO: 643 - RNA, 21 nt, Homo sapiens
gcccagcacgcccucauauuc

SEQ ID NO: 644 - RNA, 21 nt, Homo sapiens
cccagcacgcccucauauuca

SEQ ID NO: 645 - RNA, 21 nt, Homo sapiens
ccagcacgcccucauauucaa

SEQ ID NO: 646 - RNA, 21 nt, Homo sapiens
cagcacgcccucauauucaau

SEQ ID NO: 647 - RNA, 21 nt, Homo sapiens
agcacgcccucauauucaaug

SEQ ID NO: 648 - RNA, 21 nt, Homo sapiens
gcacgcccucauauucaaugg

SEQ ID NO: 649 - RNA, 21 nt, Homo sapiens
ggccuguucucucggcugcga

SEQ ID NO: 650 - RNA, 21 nt, Homo sapiens
gccuguucucucggcugcgag

SEQ ID NO: 651 - RNA, 21 nt, Homo sapiens
ccuguucucucggcugcgaga

SEQ ID NO: 652 - RNA, 21 nt, Homo sapiens
cuguucucucggcugcgagac

SEQ ID NO: 653 - RNA, 21 nt, Homo sapiens
uguucucucggcugcgagacu

SEQ ID NO: 654 - RNA, 21 nt, Homo sapiens
guucucucggcugcgagacuu

SEQ ID NO: 655 - RNA, 21 nt, Homo sapiens
uucucucggcugcgagacuuc

SEQ ID NO: 656 - RNA, 21 nt, Homo sapiens
ucucucggcugcgagacuucu

SEQ ID NO: 657 - RNA, 21 nt, Homo sapiens
cucucggcugcgagacuucua

SEQ ID NO: 658 - RNA, 21 nt, Homo sapiens
ucucggcugcgagacuucuau

SEQ ID NO: 659 - RNA, 21 nt, Homo sapiens
cucggcugcgagacuucuaug

SEQ ID NO: 660 - RNA, 21 nt, Homo sapiens
ucggcugcgagacuucuaugg

SEQ ID NO: 661 - RNA, 21 nt, Homo sapiens
cggcugcgagacuucuauggg

SEQ ID NO: 662 - RNA, 21 nt, Homo sapiens
ggcggauuucugggcacagcu

SEQ ID NO: 663 - RNA, 21 nt, Homo sapiens
gcggauuucugggcacagcuc

SEQ ID NO: 664 - RNA, 21 nt, Homo sapiens
cggauuucugggcacagcucc

SEQ ID NO: 665 - RNA, 21 nt, Homo sapiens
ggauuucugggcacagcuccu

SEQ ID NO: 666 - RNA, 21 nt, Homo sapiens
gauuucugggcacagcuccug

SEQ ID NO: 667 - RNA, 21 nt, Homo sapiens
auuucugggcacagcuccugg

SEQ ID NO: 668 - RNA, 21 nt, Homo sapiens
uuucugggcacagcuccugga

SEQ ID NO: 669 - RNA, 21 nt, Homo sapiens
uucugggcacagcuccuggag

SEQ ID NO: 670 - RNA, 21 nt, Homo sapiens
ucugggcacagcuccuggaga

SEQ ID NO: 671 - RNA, 21 nt, Homo sapiens
cugggcacagcuccuggagag

SEQ ID NO: 672 - RNA, 21 nt, Homo sapiens
ugggcacagcuccuggagaga

SEQ ID NO: 673 - RNA, 21 nt, Homo sapiens
gggcacagcuccuggagagag

SEQ ID NO: 674 - RNA, 21 nt, Homo sapiens
ggcacagcuccuggagagagu

SEQ ID NO: 675 - RNA, 21 nt, Homo sapiens
gcacagcuccuggagagagug

SEQ ID NO: 676 - RNA, 21 nt, Homo sapiens
cacagcuccuggagagagugu

SEQ ID NO: 677 - RNA, 21 nt, Homo sapiens
acagcuccuggagagaguguu

SEQ ID NO: 678 - RNA, 21 nt, Homo sapiens
cagcuccuggagagaguguuc

SEQ ID NO: 679 - RNA, 21 nt, Homo sapiens
agcuccuggagagaguguucc

SEQ ID NO: 680 - RNA, 21 nt, Homo sapiens
gcuccuggagagaguguuccc

SEQ ID NO: 681 - RNA, 21 nt, Homo sapiens
cuccuggagagaguguucccg

SEQ ID NO: 682 - RNA, 21 nt, Homo sapiens
uccuggagagaguguucccgc

SEQ ID NO: 683 - RNA, 21 nt, Homo sapiens
ccuggagagaguguucccgcu

SEQ ID NO: 684 - RNA, 21 nt, Homo sapiens
cuggagagaguguucccgcug

SEQ ID NO: 685 - RNA, 21 nt, Homo sapiens
uggagagaguguucccgcugc

SEQ ID NO: 686 - RNA, 21 nt, Homo sapiens
ggagagaguguucccgcugcu

SEQ ID NO: 687 - RNA, 21 nt, Homo sapiens
gagagaguguucccgcugcug

SEQ ID NO: 688 - RNA, 21 nt, Homo sapiens
agagaguguucccgcugcugc

SEQ ID NO: 689 - RNA, 21 nt, Homo sapiens
gagaguguucccgcugcugca

SEQ ID NO: 690 - RNA, 21 nt, Homo sapiens
agaguguucccgcugcugcac

SEQ ID NO: 691 - RNA, 21 nt, Homo sapiens
gaguguucccgcugcugcacc

SEQ ID NO: 692 - RNA, 21 nt, Homo sapiens
aguguucccgcugcugcaccc

SEQ ID NO: 693 - RNA, 21 nt, Homo sapiens
guguucccgcugcugcaccca

SEQ ID NO: 694 - RNA, 21 nt, Homo sapiens
uguucccgcugcugcacccac

SEQ ID NO: 695 - RNA, 21 nt, Homo sapiens
guucccgcugcugcacccaca

SEQ ID NO: 696 - RNA, 21 nt, Homo sapiens
uucccgcugcugcacccacag

SEQ ID NO: 697 - RNA, 21 nt, Homo sapiens
ucccgcugcugcacccacagu

SEQ ID NO: 698 - RNA, 21 nt, Homo sapiens
cccgcugcugcacccacagua

SEQ ID NO: 699 - RNA, 21 nt, Homo sapiens
ccgcugcugcacccacaguac

SEQ ID NO: 700 - RNA, 21 nt, Homo sapiens
cgcugcugcacccacaguaca

SEQ ID NO: 701 - RNA, 21 nt, Homo sapiens
gcugcugcacccacaguacag

SEQ ID NO: 702 - RNA, 21 nt, Homo sapiens
cugcugcacccacaguacagc

SEQ ID NO: 703 - RNA, 21 nt, Homo sapiens
ugcugcacccacaguacagcu

SEQ ID NO: 704 - RNA, 21 nt, Homo sapiens
gcugcacccacaguacagcuu

SEQ ID NO: 705 - RNA, 21 nt, Homo sapiens
cugcacccacaguacagcuuc

SEQ ID NO: 706 - RNA, 21 nt, Homo sapiens
ugcacccacaguacagcuucc

SEQ ID NO: 707 - RNA, 21 nt, Homo sapiens
gcacccacaguacagcuuccc

SEQ ID NO: 708 - RNA, 21 nt, Homo sapiens
cccugacuaccugcucugccu

SEQ ID NO: 709 - RNA, 21 nt, Homo sapiens
ccugacuaccugcucugccuc

SEQ ID NO: 710 - RNA, 21 nt, Homo sapiens
cugacuaccugcucugccucu

SEQ ID NO: 711 - RNA, 21 nt, Homo sapiens
ugacuaccugcucugccucuc

SEQ ID NO: 712 - RNA, 21 nt, Homo sapiens
gacuaccugcucugccucuca

SEQ ID NO: 713 - RNA, 21 nt, Homo sapiens
acuaccugcucugccucucac

SEQ ID NO: 714 - RNA, 21 nt, Homo sapiens
cuaccugcucugccucucacg

SEQ ID NO: 715 - RNA, 21 nt, Homo sapiens
uaccugcucugccucucacgc

SEQ ID NO: 716 - RNA, 21 nt, Homo sapiens
accugcucugccucucacgcu

SEQ ID NO: 717 - RNA, 21 nt, Homo sapiens
ccugcucugccucucacgcuu

SEQ ID NO: 718 - RNA, 21 nt, Homo sapiens
cugcucugccucucacgcuug

SEQ ID NO: 719 - RNA, 21 nt, Homo sapiens
ugcucugccucucacgcuugg

SEQ ID NO: 720 - RNA, 21 nt, Homo sapiens
ggcucucugcagcccuuuggg

SEQ ID NO: 721 - RNA, 21 nt, Homo sapiens
cccgccgccuccgccugcaga

SEQ ID NO: 722 - RNA, 21 nt, Homo sapiens
ccgccgccuccgccugcagau

SEQ ID NO: 723 - RNA, 21 nt, Homo sapiens
cgccgccuccgccugcagaua

SEQ ID NO: 724 - RNA, 21 nt, Homo sapiens
gccgccuccgccugcagauaa

SEQ ID NO: 725 - RNA, 21 nt, Homo sapiens
ccgccuccgccugcagauaac

SEQ ID NO: 726 - RNA, 21 nt, Homo sapiens
cgccuccgccugcagauaacc

SEQ ID NO: 727 - RNA, 21 nt, Homo sapiens
gccuccgccugcagauaaccc

SEQ ID NO: 728 - RNA, 21 nt, Homo sapiens
ccuccgccugcagauaacccg

SEQ ID NO: 729 - RNA, 21 nt, Homo sapiens
cuccgccugcagauaacccgg

SEQ ID NO: 730 - RNA, 21 nt, Homo sapiens
uccgccugcagauaacccgga

SEQ ID NO: 731 - RNA, 21 nt, Homo sapiens
ccgccugcagauaacccggac

SEQ ID NO: 732 - RNA, 21 nt, Homo sapiens
cgccugcagauaacccggacc

SEQ ID NO: 733 - RNA, 21 nt, Homo sapiens
gccugcagauaacccggaccc

SEQ ID NO: 734 - RNA, 21 nt, Homo sapiens
ccugcagauaacccggacccu

SEQ ID NO: 735 - RNA, 21 nt, Homo sapiens
cugcagauaacccggacccug

SEQ ID NO: 736 - RNA, 21 nt, Homo sapiens
ugcagauaacccggacccugg

SEQ ID NO: 737 - RNA, 21 nt, Homo sapiens
gcagauaacccggacccuggu

SEQ ID NO: 738 - RNA, 21 nt, Homo sapiens
cagauaacccggacccuggug

SEQ ID NO: 739 - RNA, 21 nt, Homo sapiens
agauaacccggacccuggugg

SEQ ID NO: 740 - RNA, 21 nt, Homo sapiens
ggcugcccgagccuuugugca

SEQ ID NO: 741 - RNA, 21 nt, Homo sapiens
gcugcccgagccuuugugcag

SEQ ID NO: 742 - RNA, 21 nt, Homo sapiens
cugcccgagccuuugugcagg

SEQ ID NO: 743 - RNA, 21 nt, Homo sapiens
ugcccgagccuuugugcaggg

SEQ ID NO: 744 - RNA, 21 nt, Homo sapiens
gcccgagccuuugugcagggc

SEQ ID NO: 745 - RNA, 21 nt, Homo sapiens
cccgagccuuugugcagggcc

SEQ ID NO: 746 - RNA, 21 nt, Homo sapiens
ccgagccuuugugcagggccu

SEQ ID NO: 747 - RNA, 21 nt, Homo sapiens
cgagccuuugugcagggccug

SEQ ID NO: 748 - RNA, 21 nt, Homo sapiens
gagccuuugugcagggccugg

SEQ ID NO: 749 - RNA, 21 nt, Homo sapiens
agccuuugugcagggccugga

SEQ ID NO: 750 - RNA, 21 nt, Homo sapiens
gccuuugugcagggccuggag

SEQ ID NO: 751 - RNA, 21 nt, Homo sapiens
ccuuugugcagggccuggaga

SEQ ID NO: 752 - RNA, 21 nt, Homo sapiens
cuuugugcagggccuggagac

SEQ ID NO: 753 - RNA, 21 nt, Homo sapiens
uuugugcagggccuggagacu

SEQ ID NO: 754 - RNA, 21 nt, Homo sapiens
uugugcagggccuggagacug

SEQ ID NO: 755 - RNA, 21 nt, Homo sapiens
ugugcagggccuggagacugg

SEQ ID NO: 756 - RNA, 21 nt, Homo sapiens
gugcagggccuggagacugga

SEQ ID NO: 757 - RNA, 21 nt, Homo sapiens
ugcagggccuggagacuggaa

SEQ ID NO: 758 - RNA, 21 nt, Homo sapiens
gcagggccuggagacuggaag

SEQ ID NO: 759 - RNA, 21 nt, Homo sapiens
cagggccuggagacuggaaga

SEQ ID NO: 760 - RNA, 21 nt, Homo sapiens
agggccuggagacuggaagaa

SEQ ID NO: 761 - RNA, 21 nt, Homo sapiens
gggccuggagacuggaagaaa

SEQ ID NO: 762 - RNA, 21 nt, Homo sapiens
ggccuggagacuggaagaaau

SEQ ID NO: 763 - RNA, 21 nt, Homo sapiens
gccuggagacuggaagaaaug

SEQ ID NO: 764 - RNA, 21 nt, Homo sapiens
ccuggagacuggaagaaaugu

SEQ ID NO: 765 - RNA, 21 nt, Homo sapiens
cuggagacuggaagaaaugug

SEQ ID NO: 766 - RNA, 21 nt, Homo sapiens
uggagacuggaagaaaugugg

SEQ ID NO: 767 - RNA, 21 nt, Homo sapiens
ggagacuggaagaaauguggu

SEQ ID NO: 768 - RNA, 21 nt, Homo sapiens
gagacuggaagaaaugugguc

SEQ ID NO: 769 - RNA, 21 nt, Homo sapiens
agacuggaagaaaugugguca

SEQ ID NO: 770 - RNA, 21 nt, Homo sapiens
gacuggaagaaauguggucag

SEQ ID NO: 771 - RNA, 21 nt, Homo sapiens
acuggaagaaauguggucagc

SEQ ID NO: 772 - RNA, 21 nt, Homo sapiens
cuggaagaaauguggucagcg

SEQ ID NO: 773 - RNA, 21 nt, Homo sapiens
uggaagaaauguggucagcga

SEQ ID NO: 774 - RNA, 21 nt, Homo sapiens
ggaagaaauguggucagcgaa

SEQ ID NO: 775 - RNA, 21 nt, Homo sapiens
gaagaaauguggucagcgaag

SEQ ID NO: 776 - RNA, 21 nt, Homo sapiens
aagaaauguggucagcgaagc

SEQ ID NO: 777 - RNA, 21 nt, Homo sapiens
agaaauguggucagcgaagcg

SEQ ID NO: 778 - RNA, 21 nt, Homo sapiens
gaaauguggucagcgaagcgc

SEQ ID NO: 779 - RNA, 21 nt, Homo sapiens
aaauguggucagcgaagcgcu

SEQ ID NO: 780 - RNA, 21 nt, Homo sapiens
aauguggucagcgaagcgcuu

SEQ ID NO: 781 - RNA, 21 nt, Homo sapiens
auguggucagcgaagcgcuua

SEQ ID NO: 782 - RNA, 21 nt, Homo sapiens
uguggucagcgaagcgcuuaa

SEQ ID NO: 783 - RNA, 21 nt, Homo sapiens
guggucagcgaagcgcuuaag

SEQ ID NO: 784 - RNA, 21 nt, Homo sapiens
uggucagcgaagcgcuuaagg

SEQ ID NO: 785 - RNA, 21 nt, Homo sapiens
ggucagcgaagcgcuuaaggu

SEQ ID NO: 786 - RNA, 21 nt, Homo sapiens
gucagcgaagcgcuuaaggug

SEQ ID NO: 787 - RNA, 21 nt, Homo sapiens
ucagcgaagcgcuuaaggugc

SEQ ID NO: 788 - RNA, 21 nt, Homo sapiens
cagcgaagcgcuuaaggugcc

SEQ ID NO: 789 - RNA, 21 nt, Homo sapiens
agcgaagcgcuuaaggugccg

SEQ ID NO: 790 - RNA, 21 nt, Homo sapiens
gcgaagcgcuuaaggugccgg

SEQ ID NO: 791 - RNA, 21 nt, Homo sapiens
cgaagcgcuuaaggugccggu

SEQ ID NO: 792 - RNA, 21 nt, Homo sapiens
gaagcgcuuaaggugccggug

SEQ ID NO: 793 - RNA, 21 nt, Homo sapiens
aagcgcuuaaggugccggugu

SEQ ID NO: 794 - RNA, 21 nt, Homo sapiens
agcgcuuaaggugccgguguc

SEQ ID NO: 795 - RNA, 21 nt, Homo sapiens
gcgcuuaaggugccggugucu

SEQ ID NO: 796 - RNA, 21 nt, Homo sapiens
cgcuuaaggugccggugucug

SEQ ID NO: 797 - RNA, 21 nt, Homo sapiens
gcuuaaggugccggugucuga

SEQ ID NO: 798 - RNA, 21 nt, Homo sapiens
cuuaaggugccggugucugaa

SEQ ID NO: 799 - RNA, 21 nt, Homo sapiens
uuaaggugccggugucugaag

SEQ ID NO: 800 - RNA, 21 nt, Homo sapiens
uaaggugccggugucugaagg

SEQ ID NO: 801 - RNA, 21 nt, Homo sapiens
aaggugccggugucugaaggc

SEQ ID NO: 802 - RNA, 21 nt, Homo sapiens
aggugccggugucugaaggcu

SEQ ID NO: 803 - RNA, 21 nt, Homo sapiens
ggugccggugucugaaggcug

SEQ ID NO: 804 - RNA, 21 nt, Homo sapiens
gugccggugucugaaggcugc

SEQ ID NO: 805 - RNA, 21 nt, Homo sapiens
ugccggugucugaaggcugca

SEQ ID NO: 806 - RNA, 21 nt, Homo sapiens
gccggugucugaaggcugcag

SEQ ID NO: 807 - RNA, 21 nt, Homo sapiens
ccggugucugaaggcugcagc

SEQ ID NO: 808 - RNA, 21 nt, Homo sapiens
cggugucugaaggcugcagcc

SEQ ID NO: 809 - RNA, 21 nt, Homo sapiens
ggugucugaaggcugcagcca

SEQ ID NO: 810 - RNA, 21 nt, Homo sapiens
gugucugaaggcugcagccag

SEQ ID NO: 811 - RNA, 21 nt, Homo sapiens
aggcucugaugcgucucaucg

SEQ ID NO: 812 - RNA, 21 nt, Homo sapiens
ggcucugaugcgucucaucgg

SEQ ID NO: 813 - RNA, 21 nt, Homo sapiens
gcucugaugcgucucaucggc

SEQ ID NO: 814 - RNA, 21 nt, Homo sapiens
cucugaugcgucucaucggcu

SEQ ID NO: 815 - RNA, 21 nt, Homo sapiens
ucugaugcgucucaucggcug

SEQ ID NO: 816 - RNA, 21 nt, Homo sapiens
cugaugcgucucaucggcugu

SEQ ID NO: 817 - RNA, 21 nt, Homo sapiens
ugaugcgucucaucggcuguc

SEQ ID NO: 818 - RNA, 21 nt, Homo sapiens
gaugcgucucaucggcugucc

SEQ ID NO: 819 - RNA, 21 nt, Homo sapiens
augcgucucaucggcuguccc

SEQ ID NO: 820 - RNA, 21 nt, Homo sapiens
cccucacuuaugcccugccag

SEQ ID NO: 821 - RNA, 21 nt, Homo sapiens
agggcuucugccucaacgugg

SEQ ID NO: 822 - RNA, 21 nt, Homo sapiens
gggcuucugccucaacguggu

SEQ ID NO: 823 - RNA, 21 nt, Homo sapiens
ggcuucugccucaacgugguu

SEQ ID NO: 824 - RNA, 21 nt, Homo sapiens
gcuucugccucaacgugguuc

SEQ ID NO: 825 - RNA, 21 nt, Homo sapiens
cuucugccucaacgugguucg

SEQ ID NO: 826 - RNA, 21 nt, Homo sapiens
uucugccucaacgugguucgu

SEQ ID NO: 827 - RNA, 21 nt, Homo sapiens
ucugccucaacgugguucgug

SEQ ID NO: 828 - RNA, 21 nt, Homo sapiens
cugccucaacgugguucgugg

SEQ ID NO: 829 - RNA, 21 nt, Homo sapiens
gggcaacuaucuggauggucu

SEQ ID NO: 830 - RNA, 21 nt, Homo sapiens
ggcaacuaucuggauggucuc

SEQ ID NO: 831 - RNA, 21 nt, Homo sapiens
gcaacuaucuggauggucucc

SEQ ID NO: 832 - RNA, 21 nt, Homo sapiens
caacuaucuggauggucuccu

SEQ ID NO: 833 - RNA, 21 nt, Homo sapiens
aacuaucuggauggucuccug

SEQ ID NO: 834 - RNA, 21 nt, Homo sapiens
acuaucuggauggucuccuga

SEQ ID NO: 835 - RNA, 21 nt, Homo sapiens
cuaucuggauggucuccugau

SEQ ID NO: 836 - RNA, 21 nt, Homo sapiens
uaucuggauggucuccugauc

SEQ ID NO: 837 - RNA, 21 nt, Homo sapiens
aucuggauggucuccugaucc

SEQ ID NO: 838 - RNA, 21 nt, Homo sapiens
ucuggauggucuccugauccu

SEQ ID NO: 839 - RNA, 21 nt, Homo sapiens
cuggauggucuccugauccug

SEQ ID NO: 840 - RNA, 21 nt, Homo sapiens
uggauggucuccugauccugg

SEQ ID NO: 841 - RNA, 21 nt, Homo sapiens
ggcugauaagcuccagggccc

SEQ ID NO: 842 - RNA, 21 nt, Homo sapiens
uuuccuuugagcugacggccg

SEQ ID NO: 843 - RNA, 21 nt, Homo sapiens
uuccuuugagcugacggccga

SEQ ID NO: 844 - RNA, 21 nt, Homo sapiens
uccuuugagcugacggccgag

SEQ ID NO: 845 - RNA, 21 nt, Homo sapiens
ccuuugagcugacggccgagu

SEQ ID NO: 846 - RNA, 21 nt, Homo sapiens
cuuugagcugacggccgaguc

SEQ ID NO: 847 - RNA, 21 nt, Homo sapiens
uuugagcugacggccgagucc

SEQ ID NO: 848 - RNA, 21 nt, Homo sapiens
uugagcugacggccgagucca

SEQ ID NO: 849 - RNA, 21 nt, Homo sapiens
ugagcugacggccgaguccau

SEQ ID NO: 850 - RNA, 21 nt, Homo sapiens
gagcugacggccgaguccauu

SEQ ID NO: 851 - RNA, 21 nt, Homo sapiens
agcugacggccgaguccauug

SEQ ID NO: 852 - RNA, 21 nt, Homo sapiens
gcugacggccgaguccauugg

SEQ ID NO: 853 - RNA, 21 nt, Homo sapiens
cugacggccgaguccauuggg

SEQ ID NO: 854 - RNA, 21 nt, Homo sapiens
gggugaagaucucggaggguu

SEQ ID NO: 855 - RNA, 21 nt, Homo sapiens
ggugaagaucucggaggguuu

SEQ ID NO: 856 - RNA, 21 nt, Homo sapiens
gugaagaucucggaggguuug

SEQ ID NO: 857 - RNA, 21 nt, Homo sapiens
ugaagaucucggaggguuuga

SEQ ID NO: 858 - RNA, 21 nt, Homo sapiens
gaagaucucggaggguuugau

SEQ ID NO: 859 - RNA, 21 nt, Homo sapiens
aagaucucggaggguuugaug

SEQ ID NO: 860 - RNA, 21 nt, Homo sapiens
agaucucggaggguuugaugu

SEQ ID NO: 861 - RNA, 21 nt, Homo sapiens
gaucucggaggguuugaugua

SEQ ID NO: 862 - RNA, 21 nt, Homo sapiens
aucucggaggguuugauguac

SEQ ID NO: 863 - RNA, 21 nt, Homo sapiens
ucucggaggguuugauguacc

SEQ ID NO: 864 - RNA, 21 nt, Homo sapiens
cucggaggguuugauguaccu

SEQ ID NO: 865 - RNA, 21 nt, Homo sapiens
ucggaggguuugauguaccug

SEQ ID NO: 866 - RNA, 21 nt, Homo sapiens
cggaggguuugauguaccugc

SEQ ID NO: 867 - RNA, 21 nt, Homo sapiens
ggaggguuugauguaccugca

SEQ ID NO: 868 - RNA, 21 nt, Homo sapiens
gaggguuugauguaccugcag

SEQ ID NO: 869 - RNA, 21 nt, Homo sapiens
aggguuugauguaccugcagg

SEQ ID NO: 870 - RNA, 21 nt, Homo sapiens
ggguuugauguaccugcagga

SEQ ID NO: 871 - RNA, 21 nt, Homo sapiens
gguuugauguaccugcaggaa

SEQ ID NO: 872 - RNA, 21 nt, Homo sapiens
guuugauguaccugcaggaaa

SEQ ID NO: 873 - RNA, 21 nt, Homo sapiens
aaacagugcgaagguguccgc

SEQ ID NO: 874 - RNA, 21 nt, Homo sapiens
aacagugcgaagguguccgcc

SEQ ID NO: 875 - RNA, 21 nt, Homo sapiens
acagugcgaagguguccgccc

SEQ ID NO: 876 - RNA, 21 nt, Homo sapiens
cagugcgaagguguccgccca

SEQ ID NO: 877 - RNA, 21 nt, Homo sapiens
agugcgaagguguccgcccag

SEQ ID NO: 878 - RNA, 21 nt, Homo sapiens
gugcgaagguguccgcccagg

SEQ ID NO: 879 - RNA, 21 nt, Homo sapiens
ugcgaagguguccgcccaggu

SEQ ID NO: 880 - RNA, 21 nt, Homo sapiens
gcgaagguguccgcccaggug

SEQ ID NO: 881 - RNA, 21 nt, Homo sapiens
cgaagguguccgcccaggugu

SEQ ID NO: 882 - RNA, 21 nt, Homo sapiens
gaagguguccgcccagguguu

SEQ ID NO: 883 - RNA, 21 nt, Homo sapiens
aagguguccgcccagguguuu

SEQ ID NO: 884 - RNA, 21 nt, Homo sapiens
agguguccgcccagguguuuc

SEQ ID NO: 885 - RNA, 21 nt, Homo sapiens
gguguccgcccagguguuuca

SEQ ID NO: 886 - RNA, 21 nt, Homo sapiens
guguccgcccagguguuucag

SEQ ID NO: 887 - RNA, 21 nt, Homo sapiens
uguccgcccagguguuucagg

SEQ ID NO: 888 - RNA, 21 nt, Homo sapiens
guccgcccagguguuucagga

SEQ ID NO: 889 - RNA, 21 nt, Homo sapiens
uccgcccagguguuucaggag

SEQ ID NO: 890 - RNA, 21 nt, Homo sapiens
ccgcccagguguuucaggagu

SEQ ID NO: 891 - RNA, 21 nt, Homo sapiens
cgcccagguguuucaggagug

SEQ ID NO: 892 - RNA, 21 nt, Homo sapiens
gcccagguguuucaggagugc

SEQ ID NO: 893 - RNA, 21 nt, Homo sapiens
cccagguguuucaggagugcg

SEQ ID NO: 894 - RNA, 21 nt, Homo sapiens
ccagguguuucaggagugcgg

SEQ ID NO: 895 - RNA, 21 nt, Homo sapiens
cagguguuucaggagugcggc

SEQ ID NO: 896 - RNA, 21 nt, Homo sapiens
agguguuucaggagugcggcc

SEQ ID NO: 897 - RNA, 21 nt, Homo sapiens
gguguuucaggagugcggccc

SEQ ID NO: 898 - RNA, 21 nt, Homo sapiens
cccgacccggugccugcccgc

SEQ ID NO: 899 - RNA, 21 nt, Homo sapiens
ccgacccggugccugcccgca

SEQ ID NO: 900 - RNA, 21 nt, Homo sapiens
cgacccggugccugcccgcaa

SEQ ID NO: 901 - RNA, 21 nt, Homo sapiens
gacccggugccugcccgcaac

SEQ ID NO: 902 - RNA, 21 nt, Homo sapiens
acccggugccugcccgcaacc

SEQ ID NO: 903 - RNA, 21 nt, Homo sapiens
cccggugccugcccgcaaccg

SEQ ID NO: 904 - RNA, 21 nt, Homo sapiens
ccggugccugcccgcaaccgu

SEQ ID NO: 905 - RNA, 21 nt, Homo sapiens
cggugccugcccgcaaccguc

SEQ ID NO: 906 - RNA, 21 nt, Homo sapiens
ggugccugcccgcaaccgucg

SEQ ID NO: 907 - RNA, 21 nt, Homo sapiens
gugccugcccgcaaccgucga

SEQ ID NO: 908 - RNA, 21 nt, Homo sapiens
ugccugcccgcaaccgucgag

SEQ ID NO: 909 - RNA, 21 nt, Homo sapiens
gccugcccgcaaccgucgagc

SEQ ID NO: 910 - RNA, 21 nt, Homo sapiens
ccugcccgcaaccgucgagcc

SEQ ID NO: 911 - RNA, 21 nt, Homo sapiens
cugcccgcaaccgucgagccc

SEQ ID NO: 912 - RNA, 21 nt, Homo sapiens
cccgggaagaggcgggccggc

SEQ ID NO: 913 - RNA, 21 nt, Homo sapiens
ccgggaagaggcgggccggcu

SEQ ID NO: 914 - RNA, 21 nt, Homo sapiens
cgggaagaggcgggccggcug

SEQ ID NO: 915 - RNA, 21 nt, Homo sapiens
gggaagaggcgggccggcugu

SEQ ID NO: 916 - RNA, 21 nt, Homo sapiens
ggaagaggcgggccggcugug

SEQ ID NO: 917 - RNA, 21 nt, Homo sapiens
gaagaggcgggccggcugugg

SEQ ID NO: 918 - RNA, 21 nt, Homo sapiens
aagaggcgggccggcuguggu

SEQ ID NO: 919 - RNA, 21 nt, Homo sapiens
agaggcgggccggcugugguc

SEQ ID NO: 920 - RNA, 21 nt, Homo sapiens
gaggcgggccggcuguggucg

SEQ ID NO: 921 - RNA, 21 nt, Homo sapiens
aggcgggccggcuguggucga

SEQ ID NO: 922 - RNA, 21 nt, Homo sapiens
ggcgggccggcuguggucgau

SEQ ID NO: 923 - RNA, 21 nt, Homo sapiens
gcgggccggcuguggucgaug

SEQ ID NO: 924 - RNA, 21 nt, Homo sapiens
cgggccggcuguggucgaugg

SEQ ID NO: 925 - RNA, 21 nt, Homo sapiens
gggccggcuguggucgauggu

SEQ ID NO: 926 - RNA, 21 nt, Homo sapiens
ggccggcuguggucgauggug

SEQ ID NO: 927 - RNA, 21 nt, Homo sapiens
gccggcuguggucgaugguga

SEQ ID NO: 928 - RNA, 21 nt, Homo sapiens
ccggcuguggucgauggugac

SEQ ID NO: 929 - RNA, 21 nt, Homo sapiens
cggcuguggucgauggugacc

SEQ ID NO: 930 - RNA, 21 nt, Homo sapiens
ggcuguggucgauggugaccg

SEQ ID NO: 931 - RNA, 21 nt, Homo sapiens
gcuguggucgauggugaccga

SEQ ID NO: 932 - RNA, 21 nt, Homo sapiens
cuguggucgauggugaccgag

SEQ ID NO: 933 - RNA, 21 nt, Homo sapiens
uguggucgauggugaccgagg

SEQ ID NO: 934 - RNA, 21 nt, Homo sapiens
guggucgauggugaccgagga

SEQ ID NO: 935 - RNA, 21 nt, Homo sapiens
uggucgauggugaccgaggag

SEQ ID NO: 936 - RNA, 21 nt, Homo sapiens
ggucgauggugaccgaggagg

SEQ ID NO: 937 - RNA, 21 nt, Homo sapiens
gucgauggugaccgaggagga

SEQ ID NO: 938 - RNA, 21 nt, Homo sapiens
ucgauggugaccgaggaggag

SEQ ID NO: 939 - RNA, 21 nt, Homo sapiens
cgauggugaccgaggaggagc

SEQ ID NO: 940 - RNA, 21 nt, Homo sapiens
gauggugaccgaggaggagcg

SEQ ID NO: 941 - RNA, 21 nt, Homo sapiens
auggugaccgaggaggagcgg

SEQ ID NO: 942 - RNA, 21 nt, Homo sapiens
uggugaccgaggaggagcggc

SEQ ID NO: 943 - RNA, 21 nt, Homo sapiens
ggugaccgaggaggagcggcc

SEQ ID NO: 944 - RNA, 21 nt, Homo sapiens
gugaccgaggaggagcggccc

SEQ ID NO: 945 - RNA, 21 nt, Homo sapiens
ugaccgaggaggagcggccca

SEQ ID NO: 946 - RNA, 21 nt, Homo sapiens
gaccgaggaggagcggcccac

SEQ ID NO: 947 - RNA, 21 nt, Homo sapiens
accgaggaggagcggcccacg

SEQ ID NO: 948 - RNA, 21 nt, Homo sapiens
ccgaggaggagcggcccacga

SEQ ID NO: 949 - RNA, 21 nt, Homo sapiens
cgaggaggagcggcccacgac

SEQ ID NO: 950 - RNA, 21 nt, Homo sapiens
gaggaggagcggcccacgacg

SEQ ID NO: 951 - RNA, 21 nt, Homo sapiens
aggaggagcggcccacgacgg

SEQ ID NO: 952 - RNA, 21 nt, Homo sapiens
ggaggagcggcccacgacggc

SEQ ID NO: 953 - RNA, 21 nt, Homo sapiens
gaggagcggcccacgacggcc

SEQ ID NO: 954 - RNA, 21 nt, Homo sapiens
aggagcggcccacgacggccg

SEQ ID NO: 955 - RNA, 21 nt, Homo sapiens
ggagcggcccacgacggccgc

SEQ ID NO: 956 - RNA, 21 nt, Homo sapiens
gagcggcccacgacggccgca

SEQ ID NO: 957 - RNA, 21 nt, Homo sapiens
agcggcccacgacggccgcag

SEQ ID NO: 958 - RNA, 21 nt, Homo sapiens
gcggcccacgacggccgcagg

SEQ ID NO: 959 - RNA, 21 nt, Homo sapiens
cggcccacgacggccgcaggc

SEQ ID NO: 960 - RNA, 21 nt, Homo sapiens
ggcccacgacggccgcaggca

SEQ ID NO: 961 - RNA, 21 nt, Homo sapiens
gcccacgacggccgcaggcac

SEQ ID NO: 962 - RNA, 21 nt, Homo sapiens
cccacgacggccgcaggcacc

SEQ ID NO: 963 - RNA, 21 nt, Homo sapiens
ccacgacggccgcaggcacca

SEQ ID NO: 964 - RNA, 21 nt, Homo sapiens
cacgacggccgcaggcaccaa

SEQ ID NO: 965 - RNA, 21 nt, Homo sapiens
acgacggccgcaggcaccaac

SEQ ID NO: 966 - RNA, 21 nt, Homo sapiens
cgacggccgcaggcaccaacc

SEQ ID NO: 967 - RNA, 21 nt, Homo sapiens
gacggccgcaggcaccaaccu

SEQ ID NO: 968 - RNA, 21 nt, Homo sapiens
acggccgcaggcaccaaccug

SEQ ID NO: 969 - RNA, 21 nt, Homo sapiens
cggccgcaggcaccaaccugc

SEQ ID NO: 970 - RNA, 21 nt, Homo sapiens
ggccgcaggcaccaaccugca

SEQ ID NO: 971 - RNA, 21 nt, Homo sapiens
gccgcaggcaccaaccugcac

SEQ ID NO: 972 - RNA, 21 nt, Homo sapiens
ccgcaggcaccaaccugcacc

SEQ ID NO: 973 - RNA, 21 nt, Homo sapiens
cgcaggcaccaaccugcaccg

SEQ ID NO: 974 - RNA, 21 nt, Homo sapiens
gcaggcaccaaccugcaccgg

SEQ ID NO: 975 - RNA, 21 nt, Homo sapiens
caggcaccaaccugcaccggc

SEQ ID NO: 976 - RNA, 21 nt, Homo sapiens
aggcaccaaccugcaccggcu

SEQ ID NO: 977 - RNA, 21 nt, Homo sapiens
ggcaccaaccugcaccggcug

SEQ ID NO: 978 - RNA, 21 nt, Homo sapiens
gcaccaaccugcaccggcugg

SEQ ID NO: 979 - RNA, 21 nt, Homo sapiens
caccaaccugcaccggcuggu

SEQ ID NO: 980 - RNA, 21 nt, Homo sapiens
accaaccugcaccggcuggug

SEQ ID NO: 981 - RNA, 21 nt, Homo sapiens
ccaaccugcaccggcuggugu

SEQ ID NO: 982 - RNA, 21 nt, Homo sapiens
caaccugcaccggcuggugug

SEQ ID NO: 983 - RNA, 21 nt, Homo sapiens
aaccugcaccggcuggugugg

SEQ ID NO: 984 - RNA, 21 nt, Homo sapiens
accugcaccggcugguguggg

SEQ ID NO: 985 - RNA, 21 nt, Homo sapiens
ccugcaccggcugguguggga

SEQ ID NO: 986 - RNA, 21 nt, Homo sapiens
cugcaccggcuggugugggag

SEQ ID NO: 987 - RNA, 21 nt, Homo sapiens
ugcaccggcuggugugggagc

SEQ ID NO: 988 - RNA, 21 nt, Homo sapiens
gcaccggcuggugugggagcu

SEQ ID NO: 989 - RNA, 21 nt, Homo sapiens
caccggcuggugugggagcuc

SEQ ID NO: 990 - RNA, 21 nt, Homo sapiens
accggcuggugugggagcucc

SEQ ID NO: 991 - RNA, 21 nt, Homo sapiens
ccggcuggugugggagcuccg

SEQ ID NO: 992 - RNA, 21 nt, Homo sapiens
cggcuggugugggagcuccgc

SEQ ID NO: 993 - RNA, 21 nt, Homo sapiens
ggcuggugugggagcuccgcg

SEQ ID NO: 994 - RNA, 21 nt, Homo sapiens
gcuggugugggagcuccgcga

SEQ ID NO: 995 - RNA, 21 nt, Homo sapiens
cuggugugggagcuccgcgag

SEQ ID NO: 996 - RNA, 21 nt, Homo sapiens
uggugugggagcuccgcgagc

SEQ ID NO: 997 - RNA, 21 nt, Homo sapiens
ggugugggagcuccgcgagcg

SEQ ID NO: 998 - RNA, 21 nt, Homo sapiens
gugugggagcuccgcgagcgu

SEQ ID NO: 999 - RNA, 21 nt, Homo sapiens
ugugggagcuccgcgagcguc

SEQ ID NO: 1000 - RNA, 21 nt, Homo sapiens
gugggagcuccgcgagcgucu

SEQ ID NO: 1001 - RNA, 21 nt, Homo sapiens
ugggagcuccgcgagcgucug

SEQ ID NO: 1002 - RNA, 21 nt, Homo sapiens
gggagcuccgcgagcgucugg

SEQ ID NO: 1003 - RNA, 21 nt, Homo sapiens
gggcuucugggcccggcuguc

SEQ ID NO: 1004 - RNA, 21 nt, Homo sapiens
ggcuucugggcccggcugucc

SEQ ID NO: 1005 - RNA, 21 nt, Homo sapiens
gcuucugggcccggcuguccc

SEQ ID NO: 1006 - RNA, 21 nt, Homo sapiens
cuucugggcccggcugucccu

SEQ ID NO: 1007 - RNA, 21 nt, Homo sapiens
uucugggcccggcugucccug

SEQ ID NO: 1008 - RNA, 21 nt, Homo sapiens
ucugggcccggcugucccuga

SEQ ID NO: 1009 - RNA, 21 nt, Homo sapiens
cugggcccggcugucccugac

SEQ ID NO: 1010 - RNA, 21 nt, Homo sapiens
ugggcccggcugucccugacg

SEQ ID NO: 1011 - RNA, 21 nt, Homo sapiens
gggcccggcugucccugacgg

SEQ ID NO: 1012 - RNA, 21 nt, Homo sapiens
ggcccggcugucccugacggu

SEQ ID NO: 1013 - RNA, 21 nt, Homo sapiens
gcccggcugucccugacggug

SEQ ID NO: 1014 - RNA, 21 nt, Homo sapiens
cccggcugucccugacggugu

SEQ ID NO: 1015 - RNA, 21 nt, Homo sapiens
ccggcugucccugacggugug

SEQ ID NO: 1016 - RNA, 21 nt, Homo sapiens
cggcugucccugacggugugc

SEQ ID NO: 1017 - RNA, 21 nt, Homo sapiens
ggcugucccugacggugugcg

SEQ ID NO: 1018 - RNA, 21 nt, Homo sapiens
gcugucccugacggugugcgg

SEQ ID NO: 1019 - RNA, 21 nt, Homo sapiens
cugucccugacggugugcgga

SEQ ID NO: 1020 - RNA, 21 nt, Homo sapiens
ugucccugacggugugcggag

SEQ ID NO: 1021 - RNA, 21 nt, Homo sapiens
gucccugacggugugcggaga

SEQ ID NO: 1022 - RNA, 21 nt, Homo sapiens
ucccugacggugugcggagac

SEQ ID NO: 1023 - RNA, 21 nt, Homo sapiens
cccugacggugugcggagacu

SEQ ID NO: 1024 - RNA, 21 nt, Homo sapiens
ccugacggugugcggagacuc

SEQ ID NO: 1025 - RNA, 21 nt, Homo sapiens
cugacggugugcggagacucu

SEQ ID NO: 1026 - RNA, 21 nt, Homo sapiens
ugacggugugcggagacucuc

SEQ ID NO: 1027 - RNA, 21 nt, Homo sapiens
gacggugugcggagacucucg

SEQ ID NO: 1028 - RNA, 21 nt, Homo sapiens
acggugugcggagacucucgc

SEQ ID NO: 1029 - RNA, 21 nt, Homo sapiens
cggugugcggagacucucgca

SEQ ID NO: 1030 - RNA, 21 nt, Homo sapiens
ggugugcggagacucucgcau

SEQ ID NO: 1031 - RNA, 21 nt, Homo sapiens
gugugcggagacucucgcaug

SEQ ID NO: 1032 - RNA, 21 nt, Homo sapiens
ugugcggagacucucgcaugg

SEQ ID NO: 1033 - RNA, 21 nt, Homo sapiens
ggcagcggacgccucgcugga

SEQ ID NO: 1034 - RNA, 21 nt, Homo sapiens
gcagcggacgccucgcuggag

SEQ ID NO: 1035 - RNA, 21 nt, Homo sapiens
cagcggacgccucgcuggagg

SEQ ID NO: 1036 - RNA, 21 nt, Homo sapiens
agcggacgccucgcuggaggc

SEQ ID NO: 1037 - RNA, 21 nt, Homo sapiens
gcggacgccucgcuggaggcg

SEQ ID NO: 1038 - RNA, 21 nt, Homo sapiens
cggacgccucgcuggaggcgg

SEQ ID NO: 1039 - RNA, 21 nt, Homo sapiens
ggacgccucgcuggaggcggc

SEQ ID NO: 1040 - RNA, 21 nt, Homo sapiens
gacgccucgcuggaggcggcg

SEQ ID NO: 1041 - RNA, 21 nt, Homo sapiens
acgccucgcuggaggcggcgc

SEQ ID NO: 1042 - RNA, 21 nt, Homo sapiens
cgccucgcuggaggcggcgcc

SEQ ID NO: 1043 - RNA, 21 nt, Homo sapiens
gccucgcuggaggcggcgccc

SEQ ID NO: 1044 - RNA, 21 nt, Homo sapiens
ccucgcuggaggcggcgcccu

SEQ ID NO: 1045 - RNA, 21 nt, Homo sapiens
cucgcuggaggcggcgcccug

SEQ ID NO: 1046 - RNA, 21 nt, Homo sapiens
ucgcuggaggcggcgcccugc

SEQ ID NO: 1047 - RNA, 21 nt, Homo sapiens
cgcuggaggcggcgcccugcu

SEQ ID NO: 1048 - RNA, 21 nt, Homo sapiens
gcuggaggcggcgcccugcug

SEQ ID NO: 1049 - RNA, 21 nt, Homo sapiens
cuggaggcggcgcccugcugg

SEQ ID NO: 1050 - RNA, 21 nt, Homo sapiens
uggaggcggcgcccugcugga

SEQ ID NO: 1051 - RNA, 21 nt, Homo sapiens
ggaggcggcgcccugcuggac

SEQ ID NO: 1052 - RNA, 21 nt, Homo sapiens
gaggcggcgcccugcuggacc

SEQ ID NO: 1053 - RNA, 21 nt, Homo sapiens
aggcggcgcccugcuggaccg

SEQ ID NO: 1054 - RNA, 21 nt, Homo sapiens
ggcggcgcccugcuggaccgg

SEQ ID NO: 1055 - RNA, 21 nt, Homo sapiens
gcggcgcccugcuggaccgga

SEQ ID NO: 1056 - RNA, 21 nt, Homo sapiens
cggcgcccugcuggaccggag

SEQ ID NO: 1057 - RNA, 21 nt, Homo sapiens
ggcgcccugcuggaccggagc

SEQ ID NO: 1058 - RNA, 21 nt, Homo sapiens
gcgcccugcuggaccggagcc

SEQ ID NO: 1059 - RNA, 21 nt, Homo sapiens
cgcccugcuggaccggagccg

SEQ ID NO: 1060 - RNA, 21 nt, Homo sapiens
gcccugcuggaccggagccgg

SEQ ID NO: 1061 - RNA, 21 nt, Homo sapiens
cccugcuggaccggagccggg

SEQ ID NO: 1062 - RNA, 21 nt, Homo sapiens
ccugcuggaccggagccgggc

SEQ ID NO: 1063 - RNA, 21 nt, Homo sapiens
cugcuggaccggagccgggcg

SEQ ID NO: 1064 - RNA, 21 nt, Homo sapiens
ugcuggaccggagccgggcgg

SEQ ID NO: 1065 - RNA, 21 nt, Homo sapiens
gcuggaccggagccgggcggg

SEQ ID NO: 1066 - RNA, 21 nt, Homo sapiens
cccggccgagcaggucaacaa

SEQ ID NO: 1067 - RNA, 21 nt, Homo sapiens
ccggccgagcaggucaacaac

SEQ ID NO: 1068 - RNA, 21 nt, Homo sapiens
cggccgagcaggucaacaacc

SEQ ID NO: 1069 - RNA, 21 nt, Homo sapiens
ggccgagcaggucaacaaccc

SEQ ID NO: 1070 - RNA, 21 nt, Homo sapiens
cccgagcucaagguggacgcc

SEQ ID NO: 1071 - RNA, 21 nt, Homo sapiens
ccgagcucaagguggacgccu

SEQ ID NO: 1072 - RNA, 21 nt, Homo sapiens
cgagcucaagguggacgccuc

SEQ ID NO: 1073 - RNA, 21 nt, Homo sapiens
gagcucaagguggacgccucg

SEQ ID NO: 1074 - RNA, 21 nt, Homo sapiens
agcucaagguggacgccucgg

SEQ ID NO: 1075 - RNA, 21 nt, Homo sapiens
gcucaagguggacgccucggg

SEQ ID NO: 1076 - RNA, 21 nt, Homo sapiens
cucaagguggacgccucgggc

SEQ ID NO: 1077 - RNA, 21 nt, Homo sapiens
ucaagguggacgccucgggcc

SEQ ID NO: 1078 - RNA, 21 nt, Homo sapiens
caagguggacgccucgggccc

SEQ ID NO: 1079 - RNA, 21 nt, Homo sapiens
cccgaugucccgacacggcgg

SEQ ID NO: 1080 - RNA, 21 nt, Homo sapiens
ccgaugucccgacacggcggc

SEQ ID NO: 1081 - RNA, 21 nt, Homo sapiens
cgaugucccgacacggcggcg

SEQ ID NO: 1082 - RNA, 21 nt, Homo sapiens
gaugucccgacacggcggcgu

SEQ ID NO: 1083 - RNA, 21 nt, Homo sapiens
augucccgacacggcggcguc

SEQ ID NO: 1084 - RNA, 21 nt, Homo sapiens
ugucccgacacggcggcgucg

SEQ ID NO: 1085 - RNA, 21 nt, Homo sapiens
gucccgacacggcggcgucgg

SEQ ID NO: 1086 - RNA, 21 nt, Homo sapiens
ucccgacacggcggcgucggc

SEQ ID NO: 1087 - RNA, 21 nt, Homo sapiens
cccgacacggcggcgucggcu

SEQ ID NO: 1088 - RNA, 21 nt, Homo sapiens
ccgacacggcggcgucggcua

SEQ ID NO: 1089 - RNA, 21 nt, Homo sapiens
cgacacggcggcgucggcuac

SEQ ID NO: 1090 - RNA, 21 nt, Homo sapiens
gacacggcggcgucggcuaca

SEQ ID NO: 1091 - RNA, 21 nt, Homo sapiens
acacggcggcgucggcuacag

SEQ ID NO: 1092 - RNA, 21 nt, Homo sapiens
cacggcggcgucggcuacagc

SEQ ID NO: 1093 - RNA, 21 nt, Homo sapiens
acggcggcgucggcuacagcu

SEQ ID NO: 1094 - RNA, 21 nt, Homo sapiens
cggcggcgucggcuacagcuc

SEQ ID NO: 1095 - RNA, 21 nt, Homo sapiens
ggcggcgucggcuacagcucc

SEQ ID NO: 1096 - RNA, 21 nt, Homo sapiens
gcggcgucggcuacagcuccg

SEQ ID NO: 1097 - RNA, 21 nt, Homo sapiens
cggcgucggcuacagcuccgg

SEQ ID NO: 1098 - RNA, 21 nt, Homo sapiens
ggcgucggcuacagcuccggg

SEQ ID NO: 1099 - RNA, 21 nt, Homo sapiens
gcgucggcuacagcuccgggc

SEQ ID NO: 1100 - RNA, 21 nt, Homo sapiens
cgucggcuacagcuccgggcg

SEQ ID NO: 1101 - RNA, 21 nt, Homo sapiens
gucggcuacagcuccgggcgg

SEQ ID NO: 1102 - RNA, 21 nt, Homo sapiens
ucggcuacagcuccgggcggc

SEQ ID NO: 1103 - RNA, 21 nt, Homo sapiens
cggcuacagcuccgggcggcc

SEQ ID NO: 1104 - RNA, 21 nt, Homo sapiens
ggcuacagcuccgggcggcca

SEQ ID NO: 1105 - RNA, 21 nt, Homo sapiens
gcuacagcuccgggcggccac

SEQ ID NO: 1106 - RNA, 21 nt, Homo sapiens
aaacggccgcacugggacacg

SEQ ID NO: 1107 - RNA, 21 nt, Homo sapiens
aacggccgcacugggacacga

SEQ ID NO: 1108 - RNA, 21 nt, Homo sapiens
acggccgcacugggacacgac

SEQ ID NO: 1109 - RNA, 21 nt, Homo sapiens
cggccgcacugggacacgacc

SEQ ID NO: 1110 - RNA, 21 nt, Homo sapiens
ggccgcacugggacacgaccu

SEQ ID NO: 1111 - RNA, 21 nt, Homo sapiens
gccgcacugggacacgaccug

SEQ ID NO: 1112 - RNA, 21 nt, Homo sapiens
ccgcacugggacacgaccugg

SEQ ID NO: 1113 - RNA, 21 nt, Homo sapiens
cgcacugggacacgaccugga

SEQ ID NO: 1114 - RNA, 21 nt, Homo sapiens
gcacugggacacgaccuggac

SEQ ID NO: 1115 - RNA, 21 nt, Homo sapiens
cacugggacacgaccuggacg

SEQ ID NO: 1116 - RNA, 21 nt, Homo sapiens
acugggacacgaccuggacgg

SEQ ID NO: 1117 - RNA, 21 nt, Homo sapiens
cugggacacgaccuggacggg

SEQ ID NO: 1118 - RNA, 21 nt, Homo sapiens
ugggacacgaccuggacgggc

SEQ ID NO: 1119 - RNA, 21 nt, Homo sapiens
gggacacgaccuggacgggca

SEQ ID NO: 1120 - RNA, 21 nt, Homo sapiens
ggacacgaccuggacgggcag

SEQ ID NO: 1121 - RNA, 21 nt, Homo sapiens
gacacgaccuggacgggcagg

SEQ ID NO: 1122 - RNA, 21 nt, Homo sapiens
acacgaccuggacgggcagga

SEQ ID NO: 1123 - RNA, 21 nt, Homo sapiens
cacgaccuggacgggcaggac

SEQ ID NO: 1124 - RNA, 21 nt, Homo sapiens
acgaccuggacgggcaggacg

SEQ ID NO: 1125 - RNA, 21 nt, Homo sapiens
cgaccuggacgggcaggacgc

SEQ ID NO: 1126 - RNA, 21 nt, Homo sapiens
gaccuggacgggcaggacgcg

SEQ ID NO: 1127 - RNA, 21 nt, Homo sapiens
accuggacgggcaggacgcgg

SEQ ID NO: 1128 - RNA, 21 nt, Homo sapiens
ccuggacgggcaggacgcgga

SEQ ID NO: 1129 - RNA, 21 nt, Homo sapiens
cuggacgggcaggacgcggau

SEQ ID NO: 1130 - RNA, 21 nt, Homo sapiens
uggacgggcaggacgcggaug

SEQ ID NO: 1131 - RNA, 21 nt, Homo sapiens
ggacgggcaggacgcggauga

SEQ ID NO: 1132 - RNA, 21 nt, Homo sapiens
gacgggcaggacgcggaugag

SEQ ID NO: 1133 - RNA, 21 nt, Homo sapiens
acgggcaggacgcggaugagg

SEQ ID NO: 1134 - RNA, 21 nt, Homo sapiens
cgggcaggacgcggaugagga

SEQ ID NO: 1135 - RNA, 21 nt, Homo sapiens
gggcaggacgcggaugaggau

SEQ ID NO: 1136 - RNA, 21 nt, Homo sapiens
ggcaggacgcggaugaggaug

SEQ ID NO: 1137 - RNA, 21 nt, Homo sapiens
gcaggacgcggaugaggaugc

SEQ ID NO: 1138 - RNA, 21 nt, Homo sapiens
caggacgcggaugaggaugcc

SEQ ID NO: 1139 - RNA, 21 nt, Homo sapiens
aggacgcggaugaggaugcca

SEQ ID NO: 1140 - RNA, 21 nt, Homo sapiens
ggacgcggaugaggaugccag

SEQ ID NO: 1141 - RNA, 21 nt, Homo sapiens
gggacagcaguaugcagauga

SEQ ID NO: 1142 - RNA, 21 nt, Homo sapiens
ggacagcaguaugcagaugac

SEQ ID NO: 1143 - RNA, 21 nt, Homo sapiens
gacagcaguaugcagaugacu

SEQ ID NO: 1144 - RNA, 21 nt, Homo sapiens
acagcaguaugcagaugacug

SEQ ID NO: 1145 - RNA, 21 nt, Homo sapiens
cagcaguaugcagaugacugg

SEQ ID NO: 1146 - RNA, 21 nt, Homo sapiens
agcaguaugcagaugacugga

SEQ ID NO: 1147 - RNA, 21 nt, Homo sapiens
gcaguaugcagaugacuggau

SEQ ID NO: 1148 - RNA, 21 nt, Homo sapiens
caguaugcagaugacuggaug

SEQ ID NO: 1149 - RNA, 21 nt, Homo sapiens
aguaugcagaugacuggaugg

SEQ ID NO: 1150 - RNA, 21 nt, Homo sapiens
cccagcccggccuccucggcc

SEQ ID NO: 1151 - RNA, 21 nt, Homo sapiens
ccagcccggccuccucggccu

SEQ ID NO: 1152 - RNA, 21 nt, Homo sapiens
cagcccggccuccucggccuc

SEQ ID NO: 1153 - RNA, 21 nt, Homo sapiens
agcccggccuccucggccucc

SEQ ID NO: 1154 - RNA, 21 nt, Homo sapiens
gcccggccuccucggccucca

SEQ ID NO: 1155 - RNA, 21 nt, Homo sapiens
cccggccuccucggccuccau

SEQ ID NO: 1156 - RNA, 21 nt, Homo sapiens
ccggccuccucggccuccaua

SEQ ID NO: 1157 - RNA, 21 nt, Homo sapiens
cggccuccucggccuccauac

SEQ ID NO: 1158 - RNA, 21 nt, Homo sapiens
ggccuccucggccuccauacc

SEQ ID NO: 1159 - RNA, 21 nt, Homo sapiens
gccuccucggccuccauaccc

SEQ ID NO: 1160 - RNA, 21 nt, Homo sapiens
ccuccucggccuccauacccu

SEQ ID NO: 1161 - RNA, 21 nt, Homo sapiens
cuccucggccuccauacccuc

SEQ ID NO: 1162 - RNA, 21 nt, Homo sapiens
uccucggccuccauacccucc

SEQ ID NO: 1163 - RNA, 21 nt, Homo sapiens
ccucggccuccauacccuccu

SEQ ID NO: 1164 - RNA, 21 nt, Homo sapiens
cucggccuccauacccuccua

SEQ ID NO: 1165 - RNA, 21 nt, Homo sapiens
ucggccuccauacccuccuag

SEQ ID NO: 1166 - RNA, 21 nt, Homo sapiens
cggccuccauacccuccuaga

SEQ ID NO: 1167 - RNA, 21 nt, Homo sapiens
ggccuccauacccuccuagaa

SEQ ID NO: 1168 - RNA, 21 nt, Homo sapiens
gccuccauacccuccuagaag

SEQ ID NO: 1169 - RNA, 21 nt, Homo sapiens
ccuccauacccuccuagaagg

SEQ ID NO: 1170 - RNA, 21 nt, Homo sapiens
cuccauacccuccuagaaggg

SEQ ID NO: 1171 - RNA, 21 nt, Homo sapiens
uccauacccuccuagaaggga

SEQ ID NO: 1172 - RNA, 21 nt, Homo sapiens
ccauacccuccuagaagggau

SEQ ID NO: 1173 - RNA, 21 nt, Homo sapiens
cauacccuccuagaagggaug

SEQ ID NO: 1174 - RNA, 21 nt, Homo sapiens
auacccuccuagaagggaugg

SEQ ID NO: 1175 - RNA, 21 nt, Homo sapiens
uacccuccuagaagggauggu

SEQ ID NO: 1176 - RNA, 21 nt, Homo sapiens
acccuccuagaagggaugguu

SEQ ID NO: 1177 - RNA, 21 nt, Homo sapiens
cccuccuagaagggaugguuc

SEQ ID NO: 1178 - RNA, 21 nt, Homo sapiens
ccuccuagaagggaugguucu

SEQ ID NO: 1179 - RNA, 21 nt, Homo sapiens
cuccuagaagggaugguucug

SEQ ID NO: 1180 - RNA, 21 nt, Homo sapiens
uccuagaagggaugguucugg

SEQ ID NO: 1181 - RNA, 21 nt, Homo sapiens
ccuagaagggaugguucuggg

SEQ ID NO: 1182 - RNA, 21 nt, Homo sapiens
ggcagugcccgcuacaaccag

SEQ ID NO: 1183 - RNA, 21 nt, Homo sapiens
gcagugcccgcuacaaccagg

SEQ ID NO: 1184 - RNA, 21 nt, Homo sapiens
cagugcccgcuacaaccaggg

SEQ ID NO: 1185 - RNA, 21 nt, Homo sapiens
agugcccgcuacaaccagggc

SEQ ID NO: 1186 - RNA, 21 nt, Homo sapiens
gugcccgcuacaaccagggcc

SEQ ID NO: 1187 - RNA, 21 nt, Homo sapiens
ugcccgcuacaaccagggccg

SEQ ID NO: 1188 - RNA, 21 nt, Homo sapiens
gcccgcuacaaccagggccgg

SEQ ID NO: 1189 - RNA, 21 nt, Homo sapiens
cccgcuacaaccagggccgga

SEQ ID NO: 1190 - RNA, 21 nt, Homo sapiens
ccgcuacaaccagggccggag

SEQ ID NO: 1191 - RNA, 21 nt, Homo sapiens
cgcuacaaccagggccggagc

SEQ ID NO: 1192 - RNA, 21 nt, Homo sapiens
gcuacaaccagggccggagca

SEQ ID NO: 1193 - RNA, 21 nt, Homo sapiens
cuacaaccagggccggagcag

SEQ ID NO: 1194 - RNA, 21 nt, Homo sapiens
uacaaccagggccggagcagg

SEQ ID NO: 1195 - RNA, 21 nt, Homo sapiens
acaaccagggccggagcagga

SEQ ID NO: 1196 - RNA, 21 nt, Homo sapiens
caaccagggccggagcaggag

SEQ ID NO: 1197 - RNA, 21 nt, Homo sapiens
aaccagggccggagcaggagu

SEQ ID NO: 1198 - RNA, 21 nt, Homo sapiens
accagggccggagcaggagug

SEQ ID NO: 1199 - RNA, 21 nt, Homo sapiens
ccagggccggagcaggagugg

SEQ ID NO: 1200 - RNA, 21 nt, Homo sapiens
cagggccggagcaggaguggg

SEQ ID NO: 1201 - RNA, 21 nt, Homo sapiens
uuucacacccaaaccauccuc

SEQ ID NO: 1202 - RNA, 21 nt, Homo sapiens
uucacacccaaaccauccuca

SEQ ID NO: 1203 - RNA, 21 nt, Homo sapiens
ucacacccaaaccauccucau

SEQ ID NO: 1204 - RNA, 21 nt, Homo sapiens
cacacccaaaccauccucauu

SEQ ID NO: 1205 - RNA, 21 nt, Homo sapiens
acacccaaaccauccucauuc

SEQ ID NO: 1206 - RNA, 21 nt, Homo sapiens
cacccaaaccauccucauucu

SEQ ID NO: 1207 - RNA, 21 nt, Homo sapiens
acccaaaccauccucauucuc

SEQ ID NO: 1208 - RNA, 21 nt, Homo sapiens
cccaaaccauccucauucucu

SEQ ID NO: 1209 - RNA, 21 nt, Homo sapiens
ccaaaccauccucauucucuc

SEQ ID NO: 1210 - RNA, 21 nt, Homo sapiens
caaaccauccucauucucucc

SEQ ID NO: 1211 - RNA, 21 nt, Homo sapiens
aaaccauccucauucucuccc

SEQ ID NO: 1212 - RNA, 21 nt, Homo sapiens
aaccauccucauucucucccu

SEQ ID NO: 1213 - RNA, 21 nt, Homo sapiens
accauccucauucucucccuc

SEQ ID NO: 1214 - RNA, 21 nt, Homo sapiens
ccauccucauucucucccucu

SEQ ID NO: 1215 - RNA, 21 nt, Homo sapiens
cauccucauucucucccucuc

SEQ ID NO: 1216 - RNA, 21 nt, Homo sapiens
auccucauucucucccucuca

SEQ ID NO: 1217 - RNA, 21 nt, Homo sapiens
uccucauucucucccucucag

SEQ ID NO: 1218 - RNA, 21 nt, Homo sapiens
ccucauucucucccucucagc

SEQ ID NO: 1219 - RNA, 21 nt, Homo sapiens
cucauucucucccucucagcc

SEQ ID NO: 1220 - RNA, 21 nt, Homo sapiens
ucauucucucccucucagccc

SEQ ID NO: 1221 - RNA, 21 nt, Homo sapiens
cauucucucccucucagcccu

SEQ ID NO: 1222 - RNA, 21 nt, Homo sapiens
auucucucccucucagcccug

SEQ ID NO: 1223 - RNA, 21 nt, Homo sapiens
uucucucccucucagcccugg

SEQ ID NO: 1224 - RNA, 21 nt, Homo sapiens
ggcccugcuuggaccucgaua

SEQ ID NO: 1225 - RNA, 21 nt, Homo sapiens
gcccugcuuggaccucgauaa

SEQ ID NO: 1226 - RNA, 21 nt, Homo sapiens
cccugcuuggaccucgauaac

SEQ ID NO: 1227 - RNA, 21 nt, Homo sapiens
ccugcuuggaccucgauaacg

SEQ ID NO: 1228 - RNA, 21 nt, Homo sapiens
cugcuuggaccucgauaacgg

SEQ ID NO: 1229 - RNA, 21 nt, Homo sapiens
ugcuuggaccucgauaacggg

SEQ ID NO: 1230 - RNA, 21 nt, Homo sapiens
gggugcccuagcaucagaagg

SEQ ID NO: 1231 - RNA, 21 nt, Homo sapiens
ggugcccuagcaucagaaggg

SEQ ID NO: 1232 - RNA, 21 nt, Homo sapiens
gugcccuagcaucagaagggu

SEQ ID NO: 1233 - RNA, 21 nt, Homo sapiens
ugcccuagcaucagaaggguu

SEQ ID NO: 1234 - RNA, 21 nt, Homo sapiens
gcccuagcaucagaaggguuc

SEQ ID NO: 1235 - RNA, 21 nt, Homo sapiens
cccuagcaucagaaggguuca

SEQ ID NO: 1236 - RNA, 21 nt, Homo sapiens
ccuagcaucagaaggguucau

SEQ ID NO: 1237 - RNA, 21 nt, Homo sapiens
cuagcaucagaaggguucaug

SEQ ID NO: 1238 - RNA, 21 nt, Homo sapiens
uagcaucagaaggguucaugg

SEQ ID NO: 1239 - RNA, 21 nt, Homo sapiens
gggcugcagagaggguagaga

SEQ ID NO: 1240 - RNA, 21 nt, Homo sapiens
ggcugcagagaggguagagaa

SEQ ID NO: 1241 - RNA, 21 nt, Homo sapiens
gcugcagagaggguagagaag

SEQ ID NO: 1242 - RNA, 21 nt, Homo sapiens
cugcagagaggguagagaagg

SEQ ID NO: 1243 - RNA, 21 nt, Homo sapiens
ugcagagaggguagagaaggg

SEQ ID NO: 1244 - RNA, 21 nt, Homo sapiens
gcagagaggguagagaaggga

SEQ ID NO: 1245 - RNA, 21 nt, Homo sapiens
cagagaggguagagaagggac

SEQ ID NO: 1246 - RNA, 21 nt, Homo sapiens
agagaggguagagaagggacu

SEQ ID NO: 1247 - RNA, 21 nt, Homo sapiens
gagaggguagagaagggacuu

SEQ ID NO: 1248 - RNA, 21 nt, Homo sapiens
agaggguagagaagggacuuu

SEQ ID NO: 1249 - RNA, 21 nt, Homo sapiens
gaggguagagaagggacuuug

SEQ ID NO: 1250 - RNA, 21 nt, Homo sapiens
aggguagagaagggacuuugc

SEQ ID NO: 1251 - RNA, 21 nt, Homo sapiens
ggguagagaagggacuuugca

SEQ ID NO: 1252 - RNA, 21 nt, Homo sapiens
gguagagaagggacuuugcag

SEQ ID NO: 1253 - RNA, 21 nt, Homo sapiens
guagagaagggacuuugcagg

SEQ ID NO: 1254 - RNA, 21 nt, Homo sapiens
uagagaagggacuuugcaggu

SEQ ID NO: 1255 - RNA, 21 nt, Homo sapiens
agagaagggacuuugcaggug

SEQ ID NO: 1256 - RNA, 21 nt, Homo sapiens
gagaagggacuuugcagguga

SEQ ID NO: 1257 - RNA, 21 nt, Homo sapiens
agaagggacuuugcaggugaa

SEQ ID NO: 1258 - RNA, 21 nt, Homo sapiens
gaagggacuuugcaggugaau

SEQ ID NO: 1259 - RNA, 21 nt, Homo sapiens
aagggacuuugcaggugaaug

SEQ ID NO: 1260 - RNA, 21 nt, Homo sapiens
agggacuuugcaggugaaugg

SEQ ID NO: 1261 - RNA, 21 nt, Homo sapiens
uuucaucagaggugggugggu

SEQ ID NO: 1262 - RNA, 21 nt, Homo sapiens
uucaucagaggugggugggug

SEQ ID NO: 1263 - RNA, 21 nt, Homo sapiens
ucaucagaggugggugggugu

SEQ ID NO: 1264 - RNA, 21 nt, Homo sapiens
caucagagguggguggguguu

SEQ ID NO: 1265 - RNA, 21 nt, Homo sapiens
aucagagguggguggguguuc

SEQ ID NO: 1266 - RNA, 21 nt, Homo sapiens
ucagagguggguggguguuca

SEQ ID NO: 1267 - RNA, 21 nt, Homo sapiens
cagagguggguggguguucac

SEQ ID NO: 1268 - RNA, 21 nt, Homo sapiens
agagguggguggguguucaca

SEQ ID NO: 1269 - RNA, 21 nt, Homo sapiens
gagguggguggguguucacaa

SEQ ID NO: 1270 - RNA, 21 nt, Homo sapiens
agguggguggguguucacaau

SEQ ID NO: 1271 - RNA, 21 nt, Homo sapiens
gguggguggguguucacaaua

SEQ ID NO: 1272 - RNA, 21 nt, Homo sapiens
guggguggguguucacaauau

SEQ ID NO: 1273 - RNA, 21 nt, Homo sapiens
uggguggguguucacaauauu

SEQ ID NO: 1274 - RNA, 21 nt, Homo sapiens
ggguggguguucacaauauuu

SEQ ID NO: 1275 - RNA, 21 nt, Homo sapiens
gguggguguucacaauauuua

SEQ ID NO: 1276 - RNA, 21 nt, Homo sapiens
guggguguucacaauauuuau

SEQ ID NO: 1277 - RNA, 21 nt, Homo sapiens
uggguguucacaauauuuauu

SEQ ID NO: 1278 - RNA, 21 nt, Homo sapiens
ggguguucacaauauuuauuu

SEQ ID NO: 1279 - RNA, 21 nt, Homo sapiens
uuucauuugguaaugggaggg

SEQ ID NO: 1280 - RNA, 21 nt, Homo sapiens
ggguauuuauuuaggagggag

SEQ ID NO: 1281 - RNA, 21 nt, Homo sapiens
gguauuuauuuaggagggagu

SEQ ID NO: 1282 - RNA, 21 nt, Homo sapiens
guauuuauuuaggagggagug

SEQ ID NO: 1283 - RNA, 21 nt, Homo sapiens
uauuuauuuaggagggagugu

SEQ ID NO: 1284 - RNA, 21 nt, Homo sapiens
auuuauuuaggagggagugug

SEQ ID NO: 1285 - RNA, 21 nt, Homo sapiens
uuuauuuaggagggagugugg

SEQ ID NO: 1286 - RNA, 21 nt, Homo sapiens
uuauuuaggagggaguguggu

SEQ ID NO: 1287 - RNA, 21 nt, Homo sapiens
uauuuaggagggagugugguu

SEQ ID NO: 1288 - RNA, 21 nt, Homo sapiens
auuuaggagggagugugguuu

SEQ ID NO: 1289 - RNA, 21 nt, Homo sapiens
uuuaggagggagugugguuuc

SEQ ID NO: 1290 - RNA, 21 nt, Homo sapiens
uuaggagggagugugguuucc

SEQ ID NO: 1291 - RNA, 21 nt, Homo sapiens
uaggagggagugugguuuccu

SEQ ID NO: 1292 - RNA, 21 nt, Homo sapiens
aggagggagugugguuuccuu

SEQ ID NO: 1293 - RNA, 21 nt, Homo sapiens
ggagggagugugguuuccuua

SEQ ID NO: 1294 - RNA, 21 nt, Homo sapiens
gagggagugugguuuccuuag

SEQ ID NO: 1295 - RNA, 21 nt, Homo sapiens
agggagugugguuuccuuaga

SEQ ID NO: 1296 - RNA, 21 nt, Homo sapiens
gggagugugguuuccuuagaa

SEQ ID NO: 1297 - RNA, 21 nt, Homo sapiens
ggagugugguuuccuuagaag

SEQ ID NO: 1298 - RNA, 21 nt, Homo sapiens
gagugugguuuccuuagaagg

SEQ ID NO: 1299 - RNA, 21 nt, Homo sapiens
agugugguuuccuuagaaggu

SEQ ID NO: 1300 - RNA, 21 nt, Homo sapiens
gugugguuuccuuagaaggua

SEQ ID NO: 1301 - RNA, 21 nt, Homo sapiens
ugugguuuccuuagaagguau

SEQ ID NO: 1302 - RNA, 21 nt, Homo sapiens
gugguuuccuuagaagguaua

SEQ ID NO: 1303 - RNA, 21 nt, Homo sapiens
ugguuuccuuagaagguauag

SEQ ID NO: 1304 - RNA, 21 nt, Homo sapiens
gguuuccuuagaagguauagu

SEQ ID NO: 1305 - RNA, 21 nt, Homo sapiens
guuuccuuagaagguauaguc

SEQ ID NO: 1306 - RNA, 21 nt, Homo sapiens
uuuccuuagaagguauagucu

SEQ ID NO: 1307 - RNA, 21 nt, Homo sapiens
uuccuuagaagguauagucuc

SEQ ID NO: 1308 - RNA, 21 nt, Homo sapiens
uccuuagaagguauagucucu

SEQ ID NO: 1309 - RNA, 21 nt, Homo sapiens
ccuuagaagguauagucucua

SEQ ID NO: 1310 - RNA, 21 nt, Homo sapiens
cuuagaagguauagucucuag

SEQ ID NO: 1311 - RNA, 21 nt, Homo sapiens
uuagaagguauagucucuagc

SEQ ID NO: 1312 - RNA, 21 nt, Homo sapiens
uagaagguauagucucuagcc

SEQ ID NO: 1313 - RNA, 21 nt, Homo sapiens
agaagguauagucucuagccc

SEQ ID NO: 1314 - RNA, 21 nt, Homo sapiens
gaagguauagucucuagcccu

SEQ ID NO: 1315 - RNA, 21 nt, Homo sapiens
aagguauagucucuagcccuc

SEQ ID NO: 1316 - RNA, 21 nt, Homo sapiens
agguauagucucuagcccucu

SEQ ID NO: 1317 - RNA, 21 nt, Homo sapiens
gguauagucucuagcccucua

SEQ ID NO: 1318 - RNA, 21 nt, Homo sapiens
guauagucucuagcccucuaa

SEQ ID NO: 1319 - RNA, 21 nt, Homo sapiens
uauagucucuagcccucuaag

SEQ ID NO: 1320 - RNA, 21 nt, Homo sapiens
auagucucuagcccucuaagg

SEQ ID NO: 1321 - RNA, 21 nt, Homo sapiens
uagucucuagcccucuaaggc

SEQ ID NO: 1322 - RNA, 21 nt, Homo sapiens
agucucuagcccucuaaggcu

SEQ ID NO: 1323 - RNA, 21 nt, Homo sapiens
gucucuagcccucuaaggcug

SEQ ID NO: 1324 - RNA, 21 nt, Homo sapiens
ucucuagcccucuaaggcugg

SEQ ID NO: 1325 - RNA, 21 nt, Homo sapiens
cucuagcccucuaaggcuggg

SEQ ID NO: 1326 - RNA, 21 nt, Homo sapiens
aaaugaggaguuuagaguugc

SEQ ID NO: 1327 - RNA, 21 nt, Homo sapiens
aaugaggaguuuagaguugca

SEQ ID NO: 1328 - RNA, 21 nt, Homo sapiens
augaggaguuuagaguugcag

SEQ ID NO: 1329 - RNA, 21 nt, Homo sapiens
ugaggaguuuagaguugcagc

SEQ ID NO: 1330 - RNA, 21 nt, Homo sapiens
gaggaguuuagaguugcagcu

SEQ ID NO: 1331 - RNA, 21 nt, Homo sapiens
aggaguuuagaguugcagcug

SEQ ID NO: 1332 - RNA, 21 nt, Homo sapiens
ggaguuuagaguugcagcugg

SEQ ID NO: 1333 - RNA, 21 nt, Homo sapiens
gaguuuagaguugcagcuggg

SEQ ID NO: 1334 - RNA, 21 nt, Homo sapiens
ggguuugaaggaaguuggaag

SEQ ID NO: 1335 - RNA, 21 nt, Homo sapiens
gguuugaaggaaguuggaagu

SEQ ID NO: 1336 - RNA, 21 nt, Homo sapiens
guuugaaggaaguuggaagug

SEQ ID NO: 1337 - RNA, 21 nt, Homo sapiens
uuugaaggaaguuggaagugg

SEQ ID NO: 1338 - RNA, 21 nt, Homo sapiens
uugaaggaaguuggaaguggg

SEQ ID NO: 1339 - RNA, 21 nt, Homo sapiens
gggcaucuggucucagaaaug

SEQ ID NO: 1340 - RNA, 21 nt, Homo sapiens
ggcaucuggucucagaaaugg

SEQ ID NO: 1341 - RNA, 21 nt, Homo sapiens
gcaucuggucucagaaaugga

SEQ ID NO: 1342 - RNA, 21 nt, Homo sapiens
caucuggucucagaaauggac

SEQ ID NO: 1343 - RNA, 21 nt, Homo sapiens
aucuggucucagaaauggacc

SEQ ID NO: 1344 - RNA, 21 nt, Homo sapiens
ucuggucucagaaauggacca

SEQ ID NO: 1345 - RNA, 21 nt, Homo sapiens
cuggucucagaaauggaccag

SEQ ID NO: 1346 - RNA, 21 nt, Homo sapiens
uggucucagaaauggaccagc

SEQ ID NO: 1347 - RNA, 21 nt, Homo sapiens
ggucucagaaauggaccagcu

SEQ ID NO: 1348 - RNA, 21 nt, Homo sapiens
gucucagaaauggaccagcug

SEQ ID NO: 1349 - RNA, 21 nt, Homo sapiens
ucucagaaauggaccagcugg

SEQ ID NO: 1350 - RNA, 21 nt, Homo sapiens
cucagaaauggaccagcugga

SEQ ID NO: 1351 - RNA, 21 nt, Homo sapiens
ucagaaauggaccagcuggau

SEQ ID NO: 1352 - RNA, 21 nt, Homo sapiens
cagaaauggaccagcuggaug

SEQ ID NO: 1353 - RNA, 21 nt, Homo sapiens
agaaauggaccagcuggaugc

SEQ ID NO: 1354 - RNA, 21 nt, Homo sapiens
gaaauggaccagcuggaugca

SEQ ID NO: 1355 - RNA, 21 nt, Homo sapiens
aaauggaccagcuggaugcag

SEQ ID NO: 1356 - RNA, 21 nt, Homo sapiens
aauggaccagcuggaugcagg

SEQ ID NO: 1357 - RNA, 21 nt, Homo sapiens
auggaccagcuggaugcaggg

SEQ ID NO: 1358 - RNA, 21 nt, Homo sapiens
uggaccagcuggaugcagggc

SEQ ID NO: 1359 - RNA, 21 nt, Homo sapiens
ggaccagcuggaugcagggca

SEQ ID NO: 1360 - RNA, 21 nt, Homo sapiens
gaccagcuggaugcagggcag

SEQ ID NO: 1361 - RNA, 21 nt, Homo sapiens
accagcuggaugcagggcagg

SEQ ID NO: 1362 - RNA, 21 nt, Homo sapiens
ccagcuggaugcagggcaggg

SEQ ID NO: 1363 - RNA, 21 nt, Homo sapiens
gggacugagggugcuugagua

SEQ ID NO: 1364 - RNA, 21 nt, Homo sapiens
ggacugagggugcuugaguag

SEQ ID NO: 1365 - RNA, 21 nt, Homo sapiens
gacugagggugcuugaguagg

SEQ ID NO: 1366 - RNA, 21 nt, Homo sapiens
acugagggugcuugaguagga

SEQ ID NO: 1367 - RNA, 21 nt, Homo sapiens
cugagggugcuugaguaggau

SEQ ID NO: 1368 - RNA, 21 nt, Homo sapiens
ugagggugcuugaguaggaug

SEQ ID NO: 1369 - RNA, 21 nt, Homo sapiens
gagggugcuugaguaggaugu

SEQ ID NO: 1370 - RNA, 21 nt, Homo sapiens
agggugcuugaguaggaugug

SEQ ID NO: 1371 - RNA, 21 nt, Homo sapiens
gggugcuugaguaggauguga

SEQ ID NO: 1372 - RNA, 21 nt, Homo sapiens
ggugcuugaguaggaugugag

SEQ ID NO: 1373 - RNA, 21 nt, Homo sapiens
gugcuugaguaggaugugaga

SEQ ID NO: 1374 - RNA, 21 nt, Homo sapiens
ugcuugaguaggaugugagac

SEQ ID NO: 1375 - RNA, 21 nt, Homo sapiens
gcuugaguaggaugugagacu

SEQ ID NO: 1376 - RNA, 21 nt, Homo sapiens
cuugaguaggaugugagacuu

SEQ ID NO: 1377 - RNA, 21 nt, Homo sapiens
uugaguaggaugugagacuuc

SEQ ID NO: 1378 - RNA, 21 nt, Homo sapiens
ugaguaggaugugagacuuca

SEQ ID NO: 1379 - RNA, 21 nt, Homo sapiens
gaguaggaugugagacuucau

SEQ ID NO: 1380 - RNA, 21 nt, Homo sapiens
aguaggaugugagacuucaug

SEQ ID NO: 1381 - RNA, 21 nt, Homo sapiens
guaggaugugagacuucaugg

SEQ ID NO: 1382 - RNA, 21 nt, Homo sapiens
uaggaugugagacuucauggg

SEQ ID NO: 1383 - RNA, 21 nt, Homo sapiens
aggaugugagacuucaugggc

SEQ ID NO: 1384 - RNA, 21 nt, Homo sapiens
ggaugugagacuucaugggcc

SEQ ID NO: 1385 - RNA, 21 nt, Homo sapiens
gaugugagacuucaugggccu

SEQ ID NO: 1386 - RNA, 21 nt, Homo sapiens
augugagacuucaugggccug

SEQ ID NO: 1387 - RNA, 21 nt, Homo sapiens
ugugagacuucaugggccugg

SEQ ID NO: 1388 - RNA, 21 nt, Homo sapiens
gugagacuucaugggccuggg

SEQ ID NO: 1389 - RNA, 21 nt, Homo sapiens
ugagacuucaugggccugggu

SEQ ID NO: 1390 - RNA, 21 nt, Homo sapiens
gagacuucaugggccuggguu

SEQ ID NO: 1391 - RNA, 21 nt, Homo sapiens
agacuucaugggccuggguuc

SEQ ID NO: 1392 - RNA, 21 nt, Homo sapiens
gacuucaugggccuggguucu

SEQ ID NO: 1393 - RNA, 21 nt, Homo sapiens
acuucaugggccuggguucug

SEQ ID NO: 1394 - RNA, 21 nt, Homo sapiens
cuucaugggccuggguucugu

SEQ ID NO: 1395 - RNA, 21 nt, Homo sapiens
uucaugggccuggguucuguu

SEQ ID NO: 1396 - RNA, 21 nt, Homo sapiens
ucaugggccuggguucuguug

SEQ ID NO: 1397 - RNA, 21 nt, Homo sapiens
caugggccuggguucuguuga

SEQ ID NO: 1398 - RNA, 21 nt, Homo sapiens
augggccuggguucuguugag

SEQ ID NO: 1399 - RNA, 21 nt, Homo sapiens
ugggccuggguucuguugagu

SEQ ID NO: 1400 - RNA, 21 nt, Homo sapiens
gggccuggguucuguugaguu

SEQ ID NO: 1401 - RNA, 21 nt, Homo sapiens
ggccuggguucuguugaguuu

SEQ ID NO: 1402 - RNA, 21 nt, Homo sapiens
uuucaguaucaauuucuuaaa

SEQ ID NO: 1403 - RNA, 21 nt, Homo sapiens
uucaguaucaauuucuuaaac

SEQ ID NO: 1404 - RNA, 21 nt, Homo sapiens
ucaguaucaauuucuuaaacc

SEQ ID NO: 1405 - RNA, 21 nt, Homo sapiens
caguaucaauuucuuaaacca

SEQ ID NO: 1406 - RNA, 21 nt, Homo sapiens
aguaucaauuucuuaaaccaa

SEQ ID NO: 1407 - RNA, 21 nt, Homo sapiens
guaucaauuucuuaaaccaaa

SEQ ID NO: 1408 - RNA, 21 nt, Homo sapiens
uaucaauuucuuaaaccaaau

SEQ ID NO: 1409 - RNA, 21 nt, Homo sapiens
aucaauuucuuaaaccaaauu

SEQ ID NO: 1410 - RNA, 21 nt, Homo sapiens
ucaauuucuuaaaccaaauuu

SEQ ID NO: 1411 - RNA, 21 nt, Homo sapiens
gggugcucaucucgugaccuc

SEQ ID NO: 1412 - RNA, 21 nt, Homo sapiens
ggugcucaucucgugaccucu

SEQ ID NO: 1413 - RNA, 21 nt, Homo sapiens
gugcucaucucgugaccucug

SEQ ID NO: 1414 - RNA, 21 nt, Homo sapiens
ugcucaucucgugaccucugc

SEQ ID NO: 1415 - RNA, 21 nt, Homo sapiens
gcucaucucgugaccucugcc

SEQ ID NO: 1416 - RNA, 21 nt, Homo sapiens
cucaucucgugaccucugcca

SEQ ID NO: 1417 - RNA, 21 nt, Homo sapiens
ucaucucgugaccucugccac

SEQ ID NO: 1418 - RNA, 21 nt, Homo sapiens
acccacauccuucacaaacuc

SEQ ID NO: 1419 - RNA, 21 nt, Homo sapiens
cccacauccuucacaaacucc

SEQ ID NO: 1420 - RNA, 21 nt, Homo sapiens
ccacauccuucacaaacucca

SEQ ID NO: 1421 - RNA, 21 nt, Homo sapiens
cacauccuucacaaacuccau

SEQ ID NO: 1422 - RNA, 21 nt, Homo sapiens
acauccuucacaaacuccaug

SEQ ID NO: 1423 - RNA, 21 nt, Homo sapiens
cauccuucacaaacuccaugu

SEQ ID NO: 1424 - RNA, 21 nt, Homo sapiens
auccuucacaaacuccauguu

SEQ ID NO: 1425 - RNA, 21 nt, Homo sapiens
uccuucacaaacuccauguuu

SEQ ID NO: 1426 - RNA, 21 nt, Homo sapiens
ccuucacaaacuccauguuuc

SEQ ID NO: 1427 - RNA, 21 nt, Homo sapiens
cuucacaaacuccauguuuca

SEQ ID NO: 1428 - RNA, 21 nt, Homo sapiens
uucacaaacuccauguuucag

SEQ ID NO: 1429 - RNA, 21 nt, Homo sapiens
ucacaaacuccauguuucagu

SEQ ID NO: 1430 - RNA, 21 nt, Homo sapiens
cacaaacuccauguuucagug

SEQ ID NO: 1431 - RNA, 21 nt, Homo sapiens
acaaacuccauguuucagugu

SEQ ID NO: 1432 - RNA, 21 nt, Homo sapiens
caaacuccauguuucaguguu

SEQ ID NO: 1433 - RNA, 21 nt, Homo sapiens
aaacuccauguuucaguguuu

SEQ ID NO: 1434 - RNA, 21 nt, Homo sapiens
aacuccauguuucaguguuug

SEQ ID NO: 1435 - RNA, 21 nt, Homo sapiens
acuccauguuucaguguuuga

SEQ ID NO: 1436 - RNA, 21 nt, Homo sapiens
cuccauguuucaguguuugag

SEQ ID NO: 1437 - RNA, 21 nt, Homo sapiens
uccauguuucaguguuugagu

SEQ ID NO: 1438 - RNA, 21 nt, Homo sapiens
ccauguuucaguguuugaguc

SEQ ID NO: 1439 - RNA, 21 nt, Homo sapiens
cauguuucaguguuugagucc

SEQ ID NO: 1440 - RNA, 21 nt, Homo sapiens
auguuucaguguuugagucca

SEQ ID NO: 1441 - RNA, 21 nt, Homo sapiens
uguuucaguguuugaguccau

SEQ ID NO: 1442 - RNA, 21 nt, Homo sapiens
guuucaguguuugaguccaug

SEQ ID NO: 1443 - RNA, 21 nt, Homo sapiens
uuucaguguuugaguccaugu

SEQ ID NO: 1444 - RNA, 21 nt, Homo sapiens
uucaguguuugaguccauguu

SEQ ID NO: 1445 - RNA, 21 nt, Homo sapiens
ucaguguuugaguccauguuu

SEQ ID NO: 1446 - RNA, 21 nt, Homo sapiens
caguguuugaguccauguuua

SEQ ID NO: 1447 - RNA, 21 nt, Homo sapiens
aguguuugaguccauguuuau

SEQ ID NO: 1448 - RNA, 21 nt, Homo sapiens
guguuugaguccauguuuauu

SEQ ID NO: 1449 - RNA, 21 nt, Homo sapiens
uguuugaguccauguuuauuc

SEQ ID NO: 1450 - RNA, 21 nt, Homo sapiens
guuugaguccauguuuauucu

SEQ ID NO: 1451 - RNA, 21 nt, Homo sapiens
uuugaguccauguuuauucug

SEQ ID NO: 1452 - RNA, 21 nt, Homo sapiens
uugaguccauguuuauucugc

SEQ ID NO: 1453 - RNA, 21 nt, Homo sapiens
ugaguccauguuuauucugca

SEQ ID NO: 1454 - RNA, 21 nt, Homo sapiens
gaguccauguuuauucugcaa

SEQ ID NO: 1455 - RNA, 21 nt, Homo sapiens
aguccauguuuauucugcaaa

SEQ ID NO: 1456 - RNA, 21 nt, Homo sapiens
guccauguuuauucugcaaau

SEQ ID NO: 1457 - RNA, 21 nt, Homo sapiens
uccauguuuauucugcaaaua

SEQ ID NO: 1458 - RNA, 21 nt, Homo sapiens
ccauguuuauucugcaaauaa

SEQ ID NO: 1459 - RNA, 21 nt, Homo sapiens
cauguuuauucugcaaauaaa

SEQ ID NO: 1460 - RNA, 21 nt, Homo sapiens
auguuuauucugcaaauaaau

SEQ ID NO: 1461 - RNA, 21 nt, Homo sapiens
uguuuauucugcaaauaaaug

SEQ ID NO: 1462 - RNA, 21 nt, Homo sapiens
guuuauucugcaaauaaaugg

SEQ ID NO: 1463 - RNA, 21 nt, Homo sapiens
uuuauucugcaaauaaauggu

SEQ ID NO: 1464 - RNA, 21 nt, Homo sapiens
uuauucugcaaauaaauggua

SEQ ID NO: 1465 - RNA, 21 nt, Homo sapiens
uauucugcaaauaaaugguaa

SEQ ID NO: 1466 - RNA, 21 nt, Homo sapiens
auucugcaaauaaaugguaau

SEQ ID NO: 1467 - RNA, 21 nt, Homo sapiens
uucugcaaauaaaugguaaug

SEQ ID NO: 1468 - RNA, 21 nt, Homo sapiens
ucugcaaauaaaugguaaugu

SEQ ID NO: 1469 - RNA, 21 nt, Homo sapiens
cugcaaauaaaugguaaugua

SEQ ID NO: 1470 - RNA, 21 nt, Homo sapiens
ugcaaauaaaugguaauguau

SEQ ID NO: 1471 - RNA, 21 nt, Homo sapiens
gcaaauaaaugguaauguauu

SEQ ID NO: 1472 - RNA, 21 nt, Homo sapiens
caaauaaaugguaauguauug

SEQ ID NO: 1473 - RNA, 21 nt, Homo sapiens
aaauaaaugguaauguauugg

SEQ ID NO: 1474 - RNA, 21 nt, Homo sapiens
aauaaaugguaauguauugga

SEQ ID NO: 1475 - RNA, 20 nt, Homo sapiens
auaaaugguaauguauugga

SEQ ID NO: 1476 - RNA, 19 nt, Homo sapiens
uaaaugguaauguauugga

SEQ ID NO: 1477 - RNA, 21 nt, Homo sapiens
aucugccgagacaaugggagc

SEQ ID NO: 1478 - RNA, 21 nt, Homo sapiens
caucugccgagacaaugggag

SEQ ID NO: 1479 - RNA, 21 nt, Homo sapiens
gcaucugccgagacaauggga

SEQ ID NO: 1480 - RNA, 21 nt, Homo sapiens
ggcaucugccgagacaauggg

SEQ ID NO: 1481 - RNA, 21 nt, Homo sapiens
cggcaucugccgagacaaugg

SEQ ID NO: 1482 - RNA, 21 nt, Homo sapiens
gcggcaucugccgagacaaug

SEQ ID NO: 1483 - RNA, 21 nt, Homo sapiens
ggcggcaucugccgagacaau

SEQ ID NO: 1484 - RNA, 21 nt, Homo sapiens
aggcggcaucugccgagacaa

SEQ ID NO: 1485 - RNA, 21 nt, Homo sapiens
caggcggcaucugccgagaca

SEQ ID NO: 1486 - RNA, 21 nt, Homo sapiens
ccaggcggcaucugccgagac

SEQ ID NO: 1487 - RNA, 21 nt, Homo sapiens
accaggcggcaucugccgaga

SEQ ID NO: 1488 - RNA, 21 nt, Homo sapiens
gaccaggcggcaucugccgag

SEQ ID NO: 1489 - RNA, 21 nt, Homo sapiens
ggaccaggcggcaucugccga

SEQ ID NO: 1490 - RNA, 21 nt, Homo sapiens
uggaccaggcggcaucugccg

SEQ ID NO: 1491 - RNA, 21 nt, Homo sapiens
cuggaccaggcggcaucugcc

SEQ ID NO: 1492 - RNA, 21 nt, Homo sapiens
gcuggaccaggcggcaucugc

SEQ ID NO: 1493 - RNA, 21 nt, Homo sapiens
agcuggaccaggcggcaucug

SEQ ID NO: 1494 - RNA, 21 nt, Homo sapiens
uagcuggaccaggcggcaucu

SEQ ID NO: 1495 - RNA, 21 nt, Homo sapiens
auagcuggaccaggcggcauc

SEQ ID NO: 1496 - RNA, 21 nt, Homo sapiens
gauagcuggaccaggcggcau

SEQ ID NO: 1497 - RNA, 21 nt, Homo sapiens
cgauagcuggaccaggcggca

SEQ ID NO: 1498 - RNA, 21 nt, Homo sapiens
acgauagcuggaccaggcggc

SEQ ID NO: 1499 - RNA, 21 nt, Homo sapiens
cacgauagcuggaccaggcgg

SEQ ID NO: 1500 - RNA, 21 nt, Homo sapiens
gcacgauagcuggaccaggcg

SEQ ID NO: 1501 - RNA, 21 nt, Homo sapiens
agcacgauagcuggaccaggc

SEQ ID NO: 1502 - RNA, 21 nt, Homo sapiens
gagcacgauagcuggaccagg

SEQ ID NO: 1503 - RNA, 21 nt, Homo sapiens
cgagcacgauagcuggaccag

SEQ ID NO: 1504 - RNA, 21 nt, Homo sapiens
ccgagcacgauagcuggacca

SEQ ID NO: 1505 - RNA, 21 nt, Homo sapiens
accgagcacgauagcuggacc

SEQ ID NO: 1506 - RNA, 21 nt, Homo sapiens
uaccgagcacgauagcuggac

SEQ ID NO: 1507 - RNA, 21 nt, Homo sapiens
auaccgagcacgauagcugga

SEQ ID NO: 1508 - RNA, 21 nt, Homo sapiens
aauaccgagcacgauagcugg

SEQ ID NO: 1509 - RNA, 21 nt, Homo sapiens
gaauaccgagcacgauagcug

SEQ ID NO: 1510 - RNA, 21 nt, Homo sapiens
ugaauaccgagcacgauagcu

SEQ ID NO: 1511 - RNA, 21 nt, Homo sapiens
cugaauaccgagcacgauagc

SEQ ID NO: 1512 - RNA, 21 nt, Homo sapiens
acugaauaccgagcacgauag

SEQ ID NO: 1513 - RNA, 21 nt, Homo sapiens
aagagcgcugcuccggaaaac

SEQ ID NO: 1514 - RNA, 21 nt, Homo sapiens
aaagagcgcugcuccggaaaa

SEQ ID NO: 1515 - RNA, 21 nt, Homo sapiens
gaaagagcgcugcuccggaaa

SEQ ID NO: 1516 - RNA, 21 nt, Homo sapiens
agaaagagcgcugcuccggaa

SEQ ID NO: 1517 - RNA, 21 nt, Homo sapiens
gagaaagagcgcugcuccgga

SEQ ID NO: 1518 - RNA, 21 nt, Homo sapiens
agagaaagagcgcugcuccgg

SEQ ID NO: 1519 - RNA, 21 nt, Homo sapiens
cgggaccgcuccgcgggccag

SEQ ID NO: 1520 - RNA, 21 nt, Homo sapiens
gcgggaccgcuccgcgggcca

SEQ ID NO: 1521 - RNA, 21 nt, Homo sapiens
cgcgggaccgcuccgcgggcc

SEQ ID NO: 1522 - RNA, 21 nt, Homo sapiens
ccgcgggaccgcuccgcgggc

SEQ ID NO: 1523 - RNA, 21 nt, Homo sapiens
gccgcgggaccgcuccgcggg

SEQ ID NO: 1524 - RNA, 21 nt, Homo sapiens
ggccgcgggaccgcuccgcgg

SEQ ID NO: 1525 - RNA, 21 nt, Homo sapiens
cggccgcgggaccgcuccgcg

SEQ ID NO: 1526 - RNA, 21 nt, Homo sapiens
ucggccgcgggaccgcuccgc

SEQ ID NO: 1527 - RNA, 21 nt, Homo sapiens
cucggccgcgggaccgcuccg

SEQ ID NO: 1528 - RNA, 21 nt, Homo sapiens
acucggccgcgggaccgcucc

SEQ ID NO: 1529 - RNA, 21 nt, Homo sapiens
uacucggccgcgggaccgcuc

SEQ ID NO: 1530 - RNA, 21 nt, Homo sapiens
guacucggccgcgggaccgcu

SEQ ID NO: 1531 - RNA, 21 nt, Homo sapiens
gguacucggccgcgggaccgc

SEQ ID NO: 1532 - RNA, 21 nt, Homo sapiens
cgguacucggccgcgggaccg

SEQ ID NO: 1533 - RNA, 21 nt, Homo sapiens
ccgguacucggccgcgggacc

SEQ ID NO: 1534 - RNA, 21 nt, Homo sapiens
uccgguacucggccgcgggac

SEQ ID NO: 1535 - RNA, 21 nt, Homo sapiens
auccgguacucggccgcggga

SEQ ID NO: 1536 - RNA, 21 nt, Homo sapiens
aauccgguacucggccgcggg

SEQ ID NO: 1537 - RNA, 21 nt, Homo sapiens
gaauccgguacucggccgcgg

SEQ ID NO: 1538 - RNA, 21 nt, Homo sapiens
ggaauccgguacucggccgcg

SEQ ID NO: 1539 - RNA, 21 nt, Homo sapiens
gggaauccgguacucggccgc

SEQ ID NO: 1540 - RNA, 21 nt, Homo sapiens
cgggaauccgguacucggccg

SEQ ID NO: 1541 - RNA, 21 nt, Homo sapiens
ucgggaauccgguacucggcc

SEQ ID NO: 1542 - RNA, 21 nt, Homo sapiens
cucgggaauccgguacucggc

SEQ ID NO: 1543 - RNA, 21 nt, Homo sapiens
acucgggaauccgguacucgg

SEQ ID NO: 1544 - RNA, 21 nt, Homo sapiens
aacucgggaauccgguacucg

SEQ ID NO: 1545 - RNA, 21 nt, Homo sapiens
aaacucgggaauccgguacuc

SEQ ID NO: 1546 - RNA, 21 nt, Homo sapiens
caaacucgggaauccgguacu

SEQ ID NO: 1547 - RNA, 21 nt, Homo sapiens
ccaaacucgggaauccgguac

SEQ ID NO: 1548 - RNA, 21 nt, Homo sapiens
cccaaacucgggaauccggua

SEQ ID NO: 1549 - RNA, 21 nt, Homo sapiens
ucccaaacucgggaauccggu

SEQ ID NO: 1550 - RNA, 21 nt, Homo sapiens
cucccaaacucgggaauccgg

SEQ ID NO: 1551 - RNA, 21 nt, Homo sapiens
ccucccaaacucgggaauccg

SEQ ID NO: 1552 - RNA, 21 nt, Homo sapiens
gccucccaaacucgggaaucc

SEQ ID NO: 1553 - RNA, 21 nt, Homo sapiens
agccucccaaacucgggaauc

SEQ ID NO: 1554 - RNA, 21 nt, Homo sapiens
gagccucccaaacucgggaau

SEQ ID NO: 1555 - RNA, 21 nt, Homo sapiens
agagccucccaaacucgggaa

SEQ ID NO: 1556 - RNA, 21 nt, Homo sapiens
cagagccucccaaacucggga

SEQ ID NO: 1557 - RNA, 21 nt, Homo sapiens
gcagagccucccaaacucggg

SEQ ID NO: 1558 - RNA, 21 nt, Homo sapiens
agcagagccucccaaacucgg

SEQ ID NO: 1559 - RNA, 21 nt, Homo sapiens
aagcagagccucccaaacucg

SEQ ID NO: 1560 - RNA, 21 nt, Homo sapiens
aaagcagagccucccaaacuc

SEQ ID NO: 1561 - RNA, 21 nt, Homo sapiens
gaaagcagagccucccaaacu

SEQ ID NO: 1562 - RNA, 21 nt, Homo sapiens
ggaaagcagagccucccaaac

SEQ ID NO: 1563 - RNA, 21 nt, Homo sapiens
aggaaagcagagccucccaaa

SEQ ID NO: 1564 - RNA, 21 nt, Homo sapiens
gaggaaagcagagccucccaa

SEQ ID NO: 1565 - RNA, 21 nt, Homo sapiens
ggaggaaagcagagccuccca

SEQ ID NO: 1566 - RNA, 21 nt, Homo sapiens
aggaggaaagcagagccuccc

SEQ ID NO: 1567 - RNA, 21 nt, Homo sapiens
aaggaggaaagcagagccucc

SEQ ID NO: 1568 - RNA, 21 nt, Homo sapiens
uaaggaggaaagcagagccuc

SEQ ID NO: 1569 - RNA, 21 nt, Homo sapiens
cuaaggaggaaagcagagccu

SEQ ID NO: 1570 - RNA, 21 nt, Homo sapiens
ccuaaggaggaaagcagagcc

SEQ ID NO: 1571 - RNA, 21 nt, Homo sapiens
uccuaaggaggaaagcagagc

SEQ ID NO: 1572 - RNA, 21 nt, Homo sapiens
guccuaaggaggaaagcagag

SEQ ID NO: 1573 - RNA, 21 nt, Homo sapiens
gguccuaaggaggaaagcaga

SEQ ID NO: 1574 - RNA, 21 nt, Homo sapiens
ggguccuaaggaggaaagcag

SEQ ID NO: 1575 - RNA, 21 nt, Homo sapiens
uggguccuaaggaggaaagca

SEQ ID NO: 1576 - RNA, 21 nt, Homo sapiens
guggguccuaaggaggaaagc

SEQ ID NO: 1577 - RNA, 21 nt, Homo sapiens
aguggguccuaaggaggaaag

SEQ ID NO: 1578 - RNA, 21 nt, Homo sapiens
aaguggguccuaaggaggaaa

SEQ ID NO: 1579 - RNA, 21 nt, Homo sapiens
aaaguggguccuaaggaggaa

SEQ ID NO: 1580 - RNA, 21 nt, Homo sapiens
caaaguggguccuaaggagga

SEQ ID NO: 1581 - RNA, 21 nt, Homo sapiens
gcaaaguggguccuaaggagg

SEQ ID NO: 1582 - RNA, 21 nt, Homo sapiens
ggcaaaguggguccuaaggag

SEQ ID NO: 1583 - RNA, 21 nt, Homo sapiens
cggcaaaguggguccuaagga

SEQ ID NO: 1584 - RNA, 21 nt, Homo sapiens
acggcaaaguggguccuaagg

SEQ ID NO: 1585 - RNA, 21 nt, Homo sapiens
gacggcaaaguggguccuaag

SEQ ID NO: 1586 - RNA, 21 nt, Homo sapiens
ggacggcaaaguggguccuaa

SEQ ID NO: 1587 - RNA, 21 nt, Homo sapiens
aggacggcaaaguggguccua

SEQ ID NO: 1588 - RNA, 21 nt, Homo sapiens
caggacggcaaaguggguccu

SEQ ID NO: 1589 - RNA, 21 nt, Homo sapiens
cgcggacauaacugcagccac

SEQ ID NO: 1590 - RNA, 21 nt, Homo sapiens
gcgcggacauaacugcagcca

SEQ ID NO: 1591 - RNA, 21 nt, Homo sapiens
agcgcggacauaacugcagcc

SEQ ID NO: 1592 - RNA, 21 nt, Homo sapiens
cagcgcggacauaacugcagc

SEQ ID NO: 1593 - RNA, 21 nt, Homo sapiens
gcagcgcggacauaacugcag

SEQ ID NO: 1594 - RNA, 21 nt, Homo sapiens
cgcagcgcggacauaacugca

SEQ ID NO: 1595 - RNA, 21 nt, Homo sapiens
ucgcagcgcggacauaacugc

SEQ ID NO: 1596 - RNA, 21 nt, Homo sapiens
gucgcagcgcggacauaacug

SEQ ID NO: 1597 - RNA, 21 nt, Homo sapiens
ggucgcagcgcggacauaacu

SEQ ID NO: 1598 - RNA, 21 nt, Homo sapiens
aggucgcagcgcggacauaac

SEQ ID NO: 1599 - RNA, 21 nt, Homo sapiens
gaggucgcagcgcggacauaa

SEQ ID NO: 1600 - RNA, 21 nt, Homo sapiens
agaggucgcagcgcggacaua

SEQ ID NO: 1601 - RNA, 21 nt, Homo sapiens
gagaggucgcagcgcggacau

SEQ ID NO: 1602 - RNA, 21 nt, Homo sapiens
ggagaggucgcagcgcggaca

SEQ ID NO: 1603 - RNA, 21 nt, Homo sapiens
aggagaggucgcagcgcggac

SEQ ID NO: 1604 - RNA, 21 nt, Homo sapiens
caggagaggucgcagcgcgga

SEQ ID NO: 1605 - RNA, 21 nt, Homo sapiens
gcaggagaggucgcagcgcgg

SEQ ID NO: 1606 - RNA, 21 nt, Homo sapiens
agcaggagaggucgcagcgcg

SEQ ID NO: 1607 - RNA, 21 nt, Homo sapiens
aagcaggagaggucgcagcgc

SEQ ID NO: 1608 - RNA, 21 nt, Homo sapiens
gaagcaggagaggucgcagcg

SEQ ID NO: 1609 - RNA, 21 nt, Homo sapiens
agaagcaggagaggucgcagc

SEQ ID NO: 1610 - RNA, 21 nt, Homo sapiens
cagaagcaggagaggucgcag

SEQ ID NO: 1611 - RNA, 21 nt, Homo sapiens
gcagaagcaggagaggucgca

SEQ ID NO: 1612 - RNA, 21 nt, Homo sapiens
agcagaagcaggagaggucgc

SEQ ID NO: 1613 - RNA, 21 nt, Homo sapiens
cagcagaagcaggagaggucg

SEQ ID NO: 1614 - RNA, 21 nt, Homo sapiens
gcagcagaagcaggagagguc

SEQ ID NO: 1615 - RNA, 21 nt, Homo sapiens
agcagcagaagcaggagaggu

SEQ ID NO: 1616 - RNA, 21 nt, Homo sapiens
cagcagcagaagcaggagagg

SEQ ID NO: 1617 - RNA, 21 nt, Homo sapiens
gcagcagcagaagcaggagag

SEQ ID NO: 1618 - RNA, 21 nt, Homo sapiens
ggcagcagcagaagcaggaga

SEQ ID NO: 1619 - RNA, 21 nt, Homo sapiens
aggcagcagcagaagcaggag

SEQ ID NO: 1620 - RNA, 21 nt, Homo sapiens
gaggcagcagcagaagcagga

SEQ ID NO: 1621 - RNA, 21 nt, Homo sapiens
agaggcagcagcagaagcagg

SEQ ID NO: 1622 - RNA, 21 nt, Homo sapiens
cagaggcagcagcagaagcag

SEQ ID NO: 1623 - RNA, 21 nt, Homo sapiens
acagaggcagcagcagaagca

SEQ ID NO: 1624 - RNA, 21 nt, Homo sapiens
cacagaggcagcagcagaagc

SEQ ID NO: 1625 - RNA, 21 nt, Homo sapiens
acacagaggcagcagcagaag

SEQ ID NO: 1626 - RNA, 21 nt, Homo sapiens
gacacagaggcagcagcagaa

SEQ ID NO: 1627 - RNA, 21 nt, Homo sapiens
ggacacagaggcagcagcaga

SEQ ID NO: 1628 - RNA, 21 nt, Homo sapiens
gggacacagaggcagcagcag

SEQ ID NO: 1629 - RNA, 21 nt, Homo sapiens
cgggacacagaggcagcagca

SEQ ID NO: 1630 - RNA, 21 nt, Homo sapiens
ccgggacacagaggcagcagc

SEQ ID NO: 1631 - RNA, 21 nt, Homo sapiens
accgggacacagaggcagcag

SEQ ID NO: 1632 - RNA, 21 nt, Homo sapiens
gaccgggacacagaggcagca

SEQ ID NO: 1633 - RNA, 21 nt, Homo sapiens
ggaccgggacacagaggcagc

SEQ ID NO: 1634 - RNA, 21 nt, Homo sapiens
aggaccgggacacagaggcag

SEQ ID NO: 1635 - RNA, 21 nt, Homo sapiens
caggaccgggacacagaggca

SEQ ID NO: 1636 - RNA, 21 nt, Homo sapiens
ccaggaccgggacacagaggc

SEQ ID NO: 1637 - RNA, 21 nt, Homo sapiens
accaggaccgggacacagagg

SEQ ID NO: 1638 - RNA, 21 nt, Homo sapiens
gaccaggaccgggacacagag

SEQ ID NO: 1639 - RNA, 21 nt, Homo sapiens
ggaccaggaccgggacacaga

SEQ ID NO: 1640 - RNA, 21 nt, Homo sapiens
gggaccaggaccgggacacag

SEQ ID NO: 1641 - RNA, 21 nt, Homo sapiens
cgggaccaggaccgggacaca

SEQ ID NO: 1642 - RNA, 21 nt, Homo sapiens
ccgggaccaggaccgggacac

SEQ ID NO: 1643 - RNA, 21 nt, Homo sapiens
uccgggaccaggaccgggaca

SEQ ID NO: 1644 - RNA, 21 nt, Homo sapiens
guccgggaccaggaccgggac

SEQ ID NO: 1645 - RNA, 21 nt, Homo sapiens
gguccgggaccaggaccggga

SEQ ID NO: 1646 - RNA, 21 nt, Homo sapiens
ggguccgggaccaggaccggg

SEQ ID NO: 1647 - RNA, 21 nt, Homo sapiens
cggguccgggaccaggaccgg

SEQ ID NO: 1648 - RNA, 21 nt, Homo sapiens
ccggguccgggaccaggaccg

SEQ ID NO: 1649 - RNA, 21 nt, Homo sapiens
cccggguccgggaccaggacc

SEQ ID NO: 1650 - RNA, 21 nt, Homo sapiens
ucccggguccgggaccaggac

SEQ ID NO: 1651 - RNA, 21 nt, Homo sapiens
cucccggguccgggaccagga

SEQ ID NO: 1652 - RNA, 21 nt, Homo sapiens
gcucccggguccgggaccagg

SEQ ID NO: 1653 - RNA, 21 nt, Homo sapiens
cgcucccggguccgggaccag

SEQ ID NO: 1654 - RNA, 21 nt, Homo sapiens
ucgcucccggguccgggacca

SEQ ID NO: 1655 - RNA, 21 nt, Homo sapiens
cucgcucccggguccgggacc

SEQ ID NO: 1656 - RNA, 21 nt, Homo sapiens
ccucgcucccggguccgggac

SEQ ID NO: 1657 - RNA, 21 nt, Homo sapiens
gccucgcucccggguccggga

SEQ ID NO: 1658 - RNA, 21 nt, Homo sapiens
ugccucgcucccggguccggg

SEQ ID NO: 1659 - RNA, 21 nt, Homo sapiens
uugccucgcucccggguccgg

SEQ ID NO: 1660 - RNA, 21 nt, Homo sapiens
uuugccucgcucccggguccg

SEQ ID NO: 1661 - RNA, 21 nt, Homo sapiens
cuuugccucgcucccgggucc

SEQ ID NO: 1662 - RNA, 21 nt, Homo sapiens
ccuuugccucgcucccggguc

SEQ ID NO: 1663 - RNA, 21 nt, Homo sapiens
accuuugccucgcucccgggu

SEQ ID NO: 1664 - RNA, 21 nt, Homo sapiens
gaccuuugccucgcucccggg

SEQ ID NO: 1665 - RNA, 21 nt, Homo sapiens
ugaccuuugccucgcucccgg

SEQ ID NO: 1666 - RNA, 21 nt, Homo sapiens
gugaccuuugccucgcucccg

SEQ ID NO: 1667 - RNA, 21 nt, Homo sapiens
ggugaccuuugccucgcuccc

SEQ ID NO: 1668 - RNA, 21 nt, Homo sapiens
gggugaccuuugccucgcucc

SEQ ID NO: 1669 - RNA, 21 nt, Homo sapiens
cgggugaccuuugccucgcuc

SEQ ID NO: 1670 - RNA, 21 nt, Homo sapiens
ccgggugaccuuugccucgcu

SEQ ID NO: 1671 - RNA, 21 nt, Homo sapiens
uccgggugaccuuugccucgc

SEQ ID NO: 1672 - RNA, 21 nt, Homo sapiens
cuccgggugaccuuugccucg

SEQ ID NO: 1673 - RNA, 21 nt, Homo sapiens
acuccgggugaccuuugccuc

SEQ ID NO: 1674 - RNA, 21 nt, Homo sapiens
aacuccgggugaccuuugccu

SEQ ID NO: 1675 - RNA, 21 nt, Homo sapiens
caacuccgggugaccuuugcc

SEQ ID NO: 1676 - RNA, 21 nt, Homo sapiens
acaacuccgggugaccuuugc

SEQ ID NO: 1677 - RNA, 21 nt, Homo sapiens
cacaacuccgggugaccuuug

SEQ ID NO: 1678 - RNA, 21 nt, Homo sapiens
gcacaacuccgggugaccuuu

SEQ ID NO: 1679 - RNA, 21 nt, Homo sapiens
ugcacaacuccgggugaccuu

SEQ ID NO: 1680 - RNA, 21 nt, Homo sapiens
cugcacaacuccgggugaccu

SEQ ID NO: 1681 - RNA, 21 nt, Homo sapiens
ucugcacaacuccgggugacc

SEQ ID NO: 1682 - RNA, 21 nt, Homo sapiens
cucugcacaacuccgggugac

SEQ ID NO: 1683 - RNA, 21 nt, Homo sapiens
ucucugcacaacuccggguga

SEQ ID NO: 1684 - RNA, 21 nt, Homo sapiens
gucucugcacaacuccgggug

SEQ ID NO: 1685 - RNA, 21 nt, Homo sapiens
ggucucugcacaacuccgggu

SEQ ID NO: 1686 - RNA, 21 nt, Homo sapiens
gggucucugcacaacuccggg

SEQ ID NO: 1687 - RNA, 21 nt, Homo sapiens
cgggucucugcacaacuccgg

SEQ ID NO: 1688 - RNA, 21 nt, Homo sapiens
ccgggucucugcacaacuccg

SEQ ID NO: 1689 - RNA, 21 nt, Homo sapiens
gccgggucucugcacaacucc

SEQ ID NO: 1690 - RNA, 21 nt, Homo sapiens
ugccgggucucugcacaacuc

SEQ ID NO: 1691 - RNA, 21 nt, Homo sapiens
cugccgggucucugcacaacu

SEQ ID NO: 1692 - RNA, 21 nt, Homo sapiens
ccugccgggucucugcacaac

SEQ ID NO: 1693 - RNA, 21 nt, Homo sapiens
accugccgggucucugcacaa

SEQ ID NO: 1694 - RNA, 21 nt, Homo sapiens
caccugccgggucucugcaca

SEQ ID NO: 1695 - RNA, 21 nt, Homo sapiens
gcaccugccgggucucugcac

SEQ ID NO: 1696 - RNA, 21 nt, Homo sapiens
agcaccugccgggucucugca

SEQ ID NO: 1697 - RNA, 21 nt, Homo sapiens
cagcaccugccgggucucugc

SEQ ID NO: 1698 - RNA, 21 nt, Homo sapiens
uagguuuaagcuauauccccg

SEQ ID NO: 1699 - RNA, 21 nt, Homo sapiens
uuagguuuaagcuauaucccc

SEQ ID NO: 1700 - RNA, 21 nt, Homo sapiens
auuagguuuaagcuauauccc

SEQ ID NO: 1701 - RNA, 21 nt, Homo sapiens
gauuagguuuaagcuauaucc

SEQ ID NO: 1702 - RNA, 21 nt, Homo sapiens
ggauuagguuuaagcuauauc

SEQ ID NO: 1703 - RNA, 21 nt, Homo sapiens
gggauuagguuuaagcuauau

SEQ ID NO: 1704 - RNA, 21 nt, Homo sapiens
agggauuagguuuaagcuaua

SEQ ID NO: 1705 - RNA, 21 nt, Homo sapiens
gagggauuagguuuaagcuau

SEQ ID NO: 1706 - RNA, 21 nt, Homo sapiens
ggagggauuagguuuaagcua

SEQ ID NO: 1707 - RNA, 21 nt, Homo sapiens
gggagggauuagguuuaagcu

SEQ ID NO: 1708 - RNA, 21 nt, Homo sapiens
cgggagggauuagguuuaagc

SEQ ID NO: 1709 - RNA, 21 nt, Homo sapiens
gcgggagggauuagguuuaag

SEQ ID NO: 1710 - RNA, 21 nt, Homo sapiens
ggcgggagggauuagguuuaa

SEQ ID NO: 1711 - RNA, 21 nt, Homo sapiens
gggcgggagggauuagguuua

SEQ ID NO: 1712 - RNA, 21 nt, Homo sapiens
agggcgggagggauuagguuu

SEQ ID NO: 1713 - RNA, 21 nt, Homo sapiens
cagggcgggagggauuagguu

SEQ ID NO: 1714 - RNA, 21 nt, Homo sapiens
ucagggcgggagggauuaggu

SEQ ID NO: 1715 - RNA, 21 nt, Homo sapiens
aucagggcgggagggauuagg

SEQ ID NO: 1716 - RNA, 21 nt, Homo sapiens
gaucagggcgggagggauuag

SEQ ID NO: 1717 - RNA, 21 nt, Homo sapiens
agaucagggcgggagggauua

SEQ ID NO: 1718 - RNA, 21 nt, Homo sapiens
gagaucagggcgggagggauu

SEQ ID NO: 1719 - RNA, 21 nt, Homo sapiens
ugagaucagggcgggagggau

SEQ ID NO: 1720 - RNA, 21 nt, Homo sapiens
cugagaucagggcgggaggga

SEQ ID NO: 1721 - RNA, 21 nt, Homo sapiens
ccugagaucagggcgggaggg

SEQ ID NO: 1722 - RNA, 21 nt, Homo sapiens
accugagaucagggcgggagg

SEQ ID NO: 1723 - RNA, 21 nt, Homo sapiens
caccugagaucagggcgggag

SEQ ID NO: 1724 - RNA, 21 nt, Homo sapiens
ucaccugagaucagggcggga

SEQ ID NO: 1725 - RNA, 21 nt, Homo sapiens
cucaccugagaucagggcggg

SEQ ID NO: 1726 - RNA, 21 nt, Homo sapiens
gcucaccugagaucagggcgg

SEQ ID NO: 1727 - RNA, 21 nt, Homo sapiens
ugcucaccugagaucagggcg

SEQ ID NO: 1728 - RNA, 21 nt, Homo sapiens
gugcucaccugagaucagggc

SEQ ID NO: 1729 - RNA, 21 nt, Homo sapiens
ggugcucaccugagaucaggg

SEQ ID NO: 1730 - RNA, 21 nt, Homo sapiens
aggugcucaccugagaucagg

SEQ ID NO: 1731 - RNA, 21 nt, Homo sapiens
gaggugcucaccugagaucag

SEQ ID NO: 1732 - RNA, 21 nt, Homo sapiens
ggaggugcucaccugagauca

SEQ ID NO: 1733 - RNA, 21 nt, Homo sapiens
cggaggugcucaccugagauc

SEQ ID NO: 1734 - RNA, 21 nt, Homo sapiens
ccggaggugcucaccugagau

SEQ ID NO: 1735 - RNA, 21 nt, Homo sapiens
cccggaggugcucaccugaga

SEQ ID NO: 1736 - RNA, 21 nt, Homo sapiens
acccggaggugcucaccugag

SEQ ID NO: 1737 - RNA, 21 nt, Homo sapiens
gacccggaggugcucaccuga

SEQ ID NO: 1738 - RNA, 21 nt, Homo sapiens
agacccggaggugcucaccug

SEQ ID NO: 1739 - RNA, 21 nt, Homo sapiens
cagacccggaggugcucaccu

SEQ ID NO: 1740 - RNA, 21 nt, Homo sapiens
acagacccggaggugcucacc

SEQ ID NO: 1741 - RNA, 21 nt, Homo sapiens
gacagacccggaggugcucac

SEQ ID NO: 1742 - RNA, 21 nt, Homo sapiens
cagcagguguacuccugggga

SEQ ID NO: 1743 - RNA, 21 nt, Homo sapiens
acagcagguguacuccugggg

SEQ ID NO: 1744 - RNA, 21 nt, Homo sapiens
aacagcagguguacuccuggg

SEQ ID NO: 1745 - RNA, 21 nt, Homo sapiens
gaacagcagguguacuccugg

SEQ ID NO: 1746 - RNA, 21 nt, Homo sapiens
ggaacagcagguguacuccug

SEQ ID NO: 1747 - RNA, 21 nt, Homo sapiens
uggaacagcagguguacuccu

SEQ ID NO: 1748 - RNA, 21 nt, Homo sapiens
cuggaacagcagguguacucc

SEQ ID NO: 1749 - RNA, 21 nt, Homo sapiens
acuggaacagcagguguacuc

SEQ ID NO: 1750 - RNA, 21 nt, Homo sapiens
cacuggaacagcagguguacu

SEQ ID NO: 1751 - RNA, 21 nt, Homo sapiens
ucacuggaacagcagguguac

SEQ ID NO: 1752 - RNA, 21 nt, Homo sapiens
cucacuggaacagcaggugua

SEQ ID NO: 1753 - RNA, 21 nt, Homo sapiens
ucucacuggaacagcaggugu

SEQ ID NO: 1754 - RNA, 21 nt, Homo sapiens
gucucacuggaacagcaggug

SEQ ID NO: 1755 - RNA, 21 nt, Homo sapiens
ugucucacuggaacagcaggu

SEQ ID NO: 1756 - RNA, 21 nt, Homo sapiens
cugucucacuggaacagcagg

SEQ ID NO: 1757 - RNA, 21 nt, Homo sapiens
ucugucucacuggaacagcag

SEQ ID NO: 1758 - RNA, 21 nt, Homo sapiens
cucugucucacuggaacagca

SEQ ID NO: 1759 - RNA, 21 nt, Homo sapiens
gcucugucucacuggaacagc

SEQ ID NO: 1760 - RNA, 21 nt, Homo sapiens
ugcucugucucacuggaacag

SEQ ID NO: 1761 - RNA, 21 nt, Homo sapiens
cugcucugucucacuggaaca

SEQ ID NO: 1762 - RNA, 21 nt, Homo sapiens
ucugcucugucucacuggaac

SEQ ID NO: 1763 - RNA, 21 nt, Homo sapiens
cucugcucugucucacuggaa

SEQ ID NO: 1764 - RNA, 21 nt, Homo sapiens
ccucugcucugucucacugga

SEQ ID NO: 1765 - RNA, 21 nt, Homo sapiens
gccucugcucugucucacugg

SEQ ID NO: 1766 - RNA, 21 nt, Homo sapiens
agccucugcucugucucacug

SEQ ID NO: 1767 - RNA, 21 nt, Homo sapiens
cagccucugcucugucucacu

SEQ ID NO: 1768 - RNA, 21 nt, Homo sapiens
ucagccucugcucugucucac

SEQ ID NO: 1769 - RNA, 21 nt, Homo sapiens
aucagccucugcucugucuca

SEQ ID NO: 1770 - RNA, 21 nt, Homo sapiens
gaucagccucugcucugucuc

SEQ ID NO: 1771 - RNA, 21 nt, Homo sapiens
ugaucagccucugcucugucu

SEQ ID NO: 1772 - RNA, 21 nt, Homo sapiens
cugaucagccucugcucuguc

SEQ ID NO: 1773 - RNA, 21 nt, Homo sapiens
ccugaucagccucugcucugu

SEQ ID NO: 1774 - RNA, 21 nt, Homo sapiens
cccugaucagccucugcucug

SEQ ID NO: 1775 - RNA, 21 nt, Homo sapiens
ucccugaucagccucugcucu

SEQ ID NO: 1776 - RNA, 21 nt, Homo sapiens
cucccugaucagccucugcuc

SEQ ID NO: 1777 - RNA, 21 nt, Homo sapiens
ucucccugaucagccucugcu

SEQ ID NO: 1778 - RNA, 21 nt, Homo sapiens
gucucccugaucagccucugc

SEQ ID NO: 1779 - RNA, 21 nt, Homo sapiens
agucucccugaucagccucug

SEQ ID NO: 1780 - RNA, 21 nt, Homo sapiens
cagucucccugaucagccucu

SEQ ID NO: 1781 - RNA, 21 nt, Homo sapiens
ucagucucccugaucagccuc

SEQ ID NO: 1782 - RNA, 21 nt, Homo sapiens
cucagucucccugaucagccu

SEQ ID NO: 1783 - RNA, 21 nt, Homo sapiens
ccucagucucccugaucagcc

SEQ ID NO: 1784 - RNA, 21 nt, Homo sapiens
gccucagucucccugaucagc

SEQ ID NO: 1785 - RNA, 21 nt, Homo sapiens
ggccucagucucccugaucag

SEQ ID NO: 1786 - RNA, 21 nt, Homo sapiens
ccaccaggccucggaaggugg

SEQ ID NO: 1787 - RNA, 21 nt, Homo sapiens
uccaccaggccucggaaggug

SEQ ID NO: 1788 - RNA, 21 nt, Homo sapiens
cuccaccaggccucggaaggu

SEQ ID NO: 1789 - RNA, 21 nt, Homo sapiens
ccuccaccaggccucggaagg

SEQ ID NO: 1790 - RNA, 21 nt, Homo sapiens
uccuccaccaggccucggaag

SEQ ID NO: 1791 - RNA, 21 nt, Homo sapiens
guccuccaccaggccucggaa

SEQ ID NO: 1792 - RNA, 21 nt, Homo sapiens
uguccuccaccaggccucgga

SEQ ID NO: 1793 - RNA, 21 nt, Homo sapiens
cuguccuccaccaggccucgg

SEQ ID NO: 1794 - RNA, 21 nt, Homo sapiens
gcuguccuccaccaggccucg

SEQ ID NO: 1795 - RNA, 21 nt, Homo sapiens
cgcuguccuccaccaggccuc

SEQ ID NO: 1796 - RNA, 21 nt, Homo sapiens
ccgcuguccuccaccaggccu

SEQ ID NO: 1797 - RNA, 21 nt, Homo sapiens
gccgcuguccuccaccaggcc

SEQ ID NO: 1798 - RNA, 21 nt, Homo sapiens
agccgcuguccuccaccaggc

SEQ ID NO: 1799 - RNA, 21 nt, Homo sapiens
gagccgcuguccuccaccagg

SEQ ID NO: 1800 - RNA, 21 nt, Homo sapiens
ggagccgcuguccuccaccag

SEQ ID NO: 1801 - RNA, 21 nt, Homo sapiens
aggagccgcuguccuccacca

SEQ ID NO: 1802 - RNA, 21 nt, Homo sapiens
aaggagccgcuguccuccacc

SEQ ID NO: 1803 - RNA, 21 nt, Homo sapiens
aaaggagccgcuguccuccac

SEQ ID NO: 1804 - RNA, 21 nt, Homo sapiens
gaaaggagccgcuguccucca

SEQ ID NO: 1805 - RNA, 21 nt, Homo sapiens
agaaaggagccgcuguccucc

SEQ ID NO: 1806 - RNA, 21 nt, Homo sapiens
cagaaaggagccgcuguccuc

SEQ ID NO: 1807 - RNA, 21 nt, Homo sapiens
ccagaaaggagccgcuguccu

SEQ ID NO: 1808 - RNA, 21 nt, Homo sapiens
accagaaaggagccgcugucc

SEQ ID NO: 1809 - RNA, 21 nt, Homo sapiens
aaccagaaaggagccgcuguc

SEQ ID NO: 1810 - RNA, 21 nt, Homo sapiens
gaaccagaaaggagccgcugu

SEQ ID NO: 1811 - RNA, 21 nt, Homo sapiens
ugaaccagaaaggagccgcug

SEQ ID NO: 1812 - RNA, 21 nt, Homo sapiens
gugaaccagaaaggagccgcu

SEQ ID NO: 1813 - RNA, 21 nt, Homo sapiens
ugugaaccagaaaggagccgc

SEQ ID NO: 1814 - RNA, 21 nt, Homo sapiens
gugugaaccagaaaggagccg

SEQ ID NO: 1815 - RNA, 21 nt, Homo sapiens
cugagagcaucuccagaaaaa

SEQ ID NO: 1816 - RNA, 21 nt, Homo sapiens
acugagagcaucuccagaaaa

SEQ ID NO: 1817 - RNA, 21 nt, Homo sapiens
uacugagagcaucuccagaaa

SEQ ID NO: 1818 - RNA, 21 nt, Homo sapiens
cuacugagagcaucuccagaa

SEQ ID NO: 1819 - RNA, 21 nt, Homo sapiens
gcuacugagagcaucuccaga

SEQ ID NO: 1820 - RNA, 21 nt, Homo sapiens
ggcuacugagagcaucuccag

SEQ ID NO: 1821 - RNA, 21 nt, Homo sapiens
gggcuacugagagcaucucca

SEQ ID NO: 1822 - RNA, 21 nt, Homo sapiens
ugggcuacugagagcaucucc

SEQ ID NO: 1823 - RNA, 21 nt, Homo sapiens
cugggcuacugagagcaucuc

SEQ ID NO: 1824 - RNA, 21 nt, Homo sapiens
gcugggcuacugagagcaucu

SEQ ID NO: 1825 - RNA, 21 nt, Homo sapiens
ugcugggcuacugagagcauc

SEQ ID NO: 1826 - RNA, 21 nt, Homo sapiens
gugcugggcuacugagagcau

SEQ ID NO: 1827 - RNA, 21 nt, Homo sapiens
agugcugggcuacugagagca

SEQ ID NO: 1828 - RNA, 21 nt, Homo sapiens
gagugcugggcuacugagagc

SEQ ID NO: 1829 - RNA, 21 nt, Homo sapiens
agagugcugggcuacugagag

SEQ ID NO: 1830 - RNA, 21 nt, Homo sapiens
gagagugcugggcuacugaga

SEQ ID NO: 1831 - RNA, 21 nt, Homo sapiens
agagagugcugggcuacugag

SEQ ID NO: 1832 - RNA, 21 nt, Homo sapiens
cagagagugcugggcuacuga

SEQ ID NO: 1833 - RNA, 21 nt, Homo sapiens
ucagagagugcugggcuacug

SEQ ID NO: 1834 - RNA, 21 nt, Homo sapiens
gucagagagugcugggcuacu

SEQ ID NO: 1835 - RNA, 21 nt, Homo sapiens
ggucagagagugcugggcuac

SEQ ID NO: 1836 - RNA, 21 nt, Homo sapiens
gggucagagagugcugggcua

SEQ ID NO: 1837 - RNA, 21 nt, Homo sapiens
ugggucagagagugcugggcu

SEQ ID NO: 1838 - RNA, 21 nt, Homo sapiens
cugggucagagagugcugggc

SEQ ID NO: 1839 - RNA, 21 nt, Homo sapiens
gcugggucagagagugcuggg

SEQ ID NO: 1840 - RNA, 21 nt, Homo sapiens
agcugggucagagagugcugg

SEQ ID NO: 1841 - RNA, 21 nt, Homo sapiens
gagcugggucagagagugcug

SEQ ID NO: 1842 - RNA, 21 nt, Homo sapiens
agagcugggucagagagugcu

SEQ ID NO: 1843 - RNA, 21 nt, Homo sapiens
aagagcugggucagagagugc

SEQ ID NO: 1844 - RNA, 21 nt, Homo sapiens
gaagagcugggucagagagug

SEQ ID NO: 1845 - RNA, 21 nt, Homo sapiens
agaagagcugggucagagagu

SEQ ID NO: 1846 - RNA, 21 nt, Homo sapiens
gagaagagcugggucagagag

SEQ ID NO: 1847 - RNA, 21 nt, Homo sapiens
ggagaagagcugggucagaga

SEQ ID NO: 1848 - RNA, 21 nt, Homo sapiens
gggagaagagcugggucagag

SEQ ID NO: 1849 - RNA, 21 nt, Homo sapiens
ugggagaagagcugggucaga

SEQ ID NO: 1850 - RNA, 21 nt, Homo sapiens
gugggagaagagcugggucag

SEQ ID NO: 1851 - RNA, 21 nt, Homo sapiens
agugggagaagagcuggguca

SEQ ID NO: 1852 - RNA, 21 nt, Homo sapiens
gagugggagaagagcuggguc

SEQ ID NO: 1853 - RNA, 21 nt, Homo sapiens
ggagugggagaagagcugggu

SEQ ID NO: 1854 - RNA, 21 nt, Homo sapiens
aggagugggagaagagcuggg

SEQ ID NO: 1855 - RNA, 21 nt, Homo sapiens
uaggagugggagaagagcugg

SEQ ID NO: 1856 - RNA, 21 nt, Homo sapiens
guaggagugggagaagagcug

SEQ ID NO: 1857 - RNA, 21 nt, Homo sapiens
cguaggagugggagaagagcu

SEQ ID NO: 1858 - RNA, 21 nt, Homo sapiens
ccguaggagugggagaagagc

SEQ ID NO: 1859 - RNA, 21 nt, Homo sapiens
gccguaggagugggagaagag

SEQ ID NO: 1860 - RNA, 21 nt, Homo sapiens
ggccguaggagugggagaaga

SEQ ID NO: 1861 - RNA, 21 nt, Homo sapiens
cggccguaggagugggagaag

SEQ ID NO: 1862 - RNA, 21 nt, Homo sapiens
gcggccguaggagugggagaa

SEQ ID NO: 1863 - RNA, 21 nt, Homo sapiens
ggcggccguaggagugggaga

SEQ ID NO: 1864 - RNA, 21 nt, Homo sapiens
aggcggccguaggagugggag

SEQ ID NO: 1865 - RNA, 21 nt, Homo sapiens
caggcggccguaggaguggga

SEQ ID NO: 1866 - RNA, 21 nt, Homo sapiens
acaggcggccguaggaguggg

SEQ ID NO: 1867 - RNA, 21 nt, Homo sapiens
uacaggcggccguaggagugg

SEQ ID NO: 1868 - RNA, 21 nt, Homo sapiens
auacaggcggccguaggagug

SEQ ID NO: 1869 - RNA, 21 nt, Homo sapiens
cauacaggcggccguaggagu

SEQ ID NO: 1870 - RNA, 21 nt, Homo sapiens
gcauacaggcggccguaggag

SEQ ID NO: 1871 - RNA, 21 nt, Homo sapiens
ggcauacaggcggccguagga

SEQ ID NO: 1872 - RNA, 21 nt, Homo sapiens
gggcauacaggcggccguagg

SEQ ID NO: 1873 - RNA, 21 nt, Homo sapiens
ugggcauacaggcggccguag

SEQ ID NO: 1874 - RNA, 21 nt, Homo sapiens
cugggcauacaggcggccgua

SEQ ID NO: 1875 - RNA, 21 nt, Homo sapiens
gcugggcauacaggcggccgu

SEQ ID NO: 1876 - RNA, 21 nt, Homo sapiens
ugcugggcauacaggcggccg

SEQ ID NO: 1877 - RNA, 21 nt, Homo sapiens
gugcugggcauacaggcggcc

SEQ ID NO: 1878 - RNA, 21 nt, Homo sapiens
cgugcugggcauacaggcggc

SEQ ID NO: 1879 - RNA, 21 nt, Homo sapiens
gcgugcugggcauacaggcgg

SEQ ID NO: 1880 - RNA, 21 nt, Homo sapiens
ggcgugcugggcauacaggcg

SEQ ID NO: 1881 - RNA, 21 nt, Homo sapiens
gggcgugcugggcauacaggc

SEQ ID NO: 1882 - RNA, 21 nt, Homo sapiens
agggcgugcugggcauacagg

SEQ ID NO: 1883 - RNA, 21 nt, Homo sapiens
gagggcgugcugggcauacag

SEQ ID NO: 1884 - RNA, 21 nt, Homo sapiens
ugagggcgugcugggcauaca

SEQ ID NO: 1885 - RNA, 21 nt, Homo sapiens
augagggcgugcugggcauac

SEQ ID NO: 1886 - RNA, 21 nt, Homo sapiens
uaugagggcgugcugggcaua

SEQ ID NO: 1887 - RNA, 21 nt, Homo sapiens
auaugagggcgugcugggcau

SEQ ID NO: 1888 - RNA, 21 nt, Homo sapiens
aauaugagggcgugcugggca

SEQ ID NO: 1889 - RNA, 21 nt, Homo sapiens
gaauaugagggcgugcugggc

SEQ ID NO: 1890 - RNA, 21 nt, Homo sapiens
ugaauaugagggcgugcuggg

SEQ ID NO: 1891 - RNA, 21 nt, Homo sapiens
uugaauaugagggcgugcugg

SEQ ID NO: 1892 - RNA, 21 nt, Homo sapiens
auugaauaugagggcgugcug

SEQ ID NO: 1893 - RNA, 21 nt, Homo sapiens
gcagccgagagaacaggccau

SEQ ID NO: 1894 - RNA, 21 nt, Homo sapiens
cgcagccgagagaacaggcca

SEQ ID NO: 1895 - RNA, 21 nt, Homo sapiens
ucgcagccgagagaacaggcc

SEQ ID NO: 1896 - RNA, 21 nt, Homo sapiens
cucgcagccgagagaacaggc

SEQ ID NO: 1897 - RNA, 21 nt, Homo sapiens
ucucgcagccgagagaacagg

SEQ ID NO: 1898 - RNA, 21 nt, Homo sapiens
gucucgcagccgagagaacag

SEQ ID NO: 1899 - RNA, 21 nt, Homo sapiens
agucucgcagccgagagaaca

SEQ ID NO: 1900 - RNA, 21 nt, Homo sapiens
aagucucgcagccgagagaac

SEQ ID NO: 1901 - RNA, 21 nt, Homo sapiens
gaagucucgcagccgagagaa

SEQ ID NO: 1902 - RNA, 21 nt, Homo sapiens
agaagucucgcagccgagaga

SEQ ID NO: 1903 - RNA, 21 nt, Homo sapiens
uagaagucucgcagccgagag

SEQ ID NO: 1904 - RNA, 21 nt, Homo sapiens
auagaagucucgcagccgaga

SEQ ID NO: 1905 - RNA, 21 nt, Homo sapiens
cauagaagucucgcagccgag

SEQ ID NO: 1906 - RNA, 21 nt, Homo sapiens
cugugcccagaaauccgccag

SEQ ID NO: 1907 - RNA, 21 nt, Homo sapiens
gcugugcccagaaauccgcca

SEQ ID NO: 1908 - RNA, 21 nt, Homo sapiens
agcugugcccagaaauccgcc

SEQ ID NO: 1909 - RNA, 21 nt, Homo sapiens
gagcugugcccagaaauccgc

SEQ ID NO: 1910 - RNA, 21 nt, Homo sapiens
ggagcugugcccagaaauccg

SEQ ID NO: 1911 - RNA, 21 nt, Homo sapiens
aggagcugugcccagaaaucc

SEQ ID NO: 1912 - RNA, 21 nt, Homo sapiens
caggagcugugcccagaaauc

SEQ ID NO: 1913 - RNA, 21 nt, Homo sapiens
ccaggagcugugcccagaaau

SEQ ID NO: 1914 - RNA, 21 nt, Homo sapiens
uccaggagcugugcccagaaa

SEQ ID NO: 1915 - RNA, 21 nt, Homo sapiens
cuccaggagcugugcccagaa

SEQ ID NO: 1916 - RNA, 21 nt, Homo sapiens
ucuccaggagcugugcccaga

SEQ ID NO: 1917 - RNA, 21 nt, Homo sapiens
cucuccaggagcugugcccag

SEQ ID NO: 1918 - RNA, 21 nt, Homo sapiens
ucucuccaggagcugugccca

SEQ ID NO: 1919 - RNA, 21 nt, Homo sapiens
cucucuccaggagcugugccc

SEQ ID NO: 1920 - RNA, 21 nt, Homo sapiens
acucucuccaggagcugugcc

SEQ ID NO: 1921 - RNA, 21 nt, Homo sapiens
cacucucuccaggagcugugc

SEQ ID NO: 1922 - RNA, 21 nt, Homo sapiens
acacucucuccaggagcugug

SEQ ID NO: 1923 - RNA, 21 nt, Homo sapiens
aacacucucuccaggagcugu

SEQ ID NO: 1924 - RNA, 21 nt, Homo sapiens
gaacacucucuccaggagcug

SEQ ID NO: 1925 - RNA, 21 nt, Homo sapiens
ggaacacucucuccaggagcu

SEQ ID NO: 1926 - RNA, 21 nt, Homo sapiens
gggaacacucucuccaggagc

SEQ ID NO: 1927 - RNA, 21 nt, Homo sapiens
cgggaacacucucuccaggag

SEQ ID NO: 1928 - RNA, 21 nt, Homo sapiens
gcgggaacacucucuccagga

SEQ ID NO: 1929 - RNA, 21 nt, Homo sapiens
agcgggaacacucucuccagg

SEQ ID NO: 1930 - RNA, 21 nt, Homo sapiens
cagcgggaacacucucuccag

SEQ ID NO: 1931 - RNA, 21 nt, Homo sapiens
gcagcgggaacacucucucca

SEQ ID NO: 1932 - RNA, 21 nt, Homo sapiens
agcagcgggaacacucucucc

SEQ ID NO: 1933 - RNA, 21 nt, Homo sapiens
cagcagcgggaacacucucuc

SEQ ID NO: 1934 - RNA, 21 nt, Homo sapiens
gcagcagcgggaacacucucu

SEQ ID NO: 1935 - RNA, 21 nt, Homo sapiens
ugcagcagcgggaacacucuc

SEQ ID NO: 1936 - RNA, 21 nt, Homo sapiens
gugcagcagcgggaacacucu

SEQ ID NO: 1937 - RNA, 21 nt, Homo sapiens
ggugcagcagcgggaacacuc

SEQ ID NO: 1938 - RNA, 21 nt, Homo sapiens
gggugcagcagcgggaacacu

SEQ ID NO: 1939 - RNA, 21 nt, Homo sapiens
ugggugcagcagcgggaacac

SEQ ID NO: 1940 - RNA, 21 nt, Homo sapiens
gugggugcagcagcgggaaca

SEQ ID NO: 1941 - RNA, 21 nt, Homo sapiens
ugugggugcagcagcgggaac

SEQ ID NO: 1942 - RNA, 21 nt, Homo sapiens
cugugggugcagcagcgggaa

SEQ ID NO: 1943 - RNA, 21 nt, Homo sapiens
acugugggugcagcagcggga

SEQ ID NO: 1944 - RNA, 21 nt, Homo sapiens
uacugugggugcagcagcggg

SEQ ID NO: 1945 - RNA, 21 nt, Homo sapiens
guacugugggugcagcagcgg

SEQ ID NO: 1946 - RNA, 21 nt, Homo sapiens
uguacugugggugcagcagcg

SEQ ID NO: 1947 - RNA, 21 nt, Homo sapiens
cuguacugugggugcagcagc

SEQ ID NO: 1948 - RNA, 21 nt, Homo sapiens
gcuguacugugggugcagcag

SEQ ID NO: 1949 - RNA, 21 nt, Homo sapiens
agcuguacugugggugcagca

SEQ ID NO: 1950 - RNA, 21 nt, Homo sapiens
aagcuguacugugggugcagc

SEQ ID NO: 1951 - RNA, 21 nt, Homo sapiens
gaagcuguacugugggugcag

SEQ ID NO: 1952 - RNA, 21 nt, Homo sapiens
gcagagcagguagucaggggg

SEQ ID NO: 1953 - RNA, 21 nt, Homo sapiens
ggcagagcagguagucagggg

SEQ ID NO: 1954 - RNA, 21 nt, Homo sapiens
aggcagagcagguagucaggg

SEQ ID NO: 1955 - RNA, 21 nt, Homo sapiens
gaggcagagcagguagucagg

SEQ ID NO: 1956 - RNA, 21 nt, Homo sapiens
agaggcagagcagguagucag

SEQ ID NO: 1957 - RNA, 21 nt, Homo sapiens
gagaggcagagcagguaguca

SEQ ID NO: 1958 - RNA, 21 nt, Homo sapiens
ugagaggcagagcagguaguc

SEQ ID NO: 1959 - RNA, 21 nt, Homo sapiens
gugagaggcagagcagguagu

SEQ ID NO: 1960 - RNA, 21 nt, Homo sapiens
cgugagaggcagagcagguag

SEQ ID NO: 1961 - RNA, 21 nt, Homo sapiens
gcgugagaggcagagcaggua

SEQ ID NO: 1962 - RNA, 21 nt, Homo sapiens
agcgugagaggcagagcaggu

SEQ ID NO: 1963 - RNA, 21 nt, Homo sapiens
aagcgugagaggcagagcagg

SEQ ID NO: 1964 - RNA, 21 nt, Homo sapiens
caaagggcugcagagagccau

SEQ ID NO: 1965 - RNA, 21 nt, Homo sapiens
ugcaggcggaggcggcggggu

SEQ ID NO: 1966 - RNA, 21 nt, Homo sapiens
cugcaggcggaggcggcgggg

SEQ ID NO: 1967 - RNA, 21 nt, Homo sapiens
ucugcaggcggaggcggcggg

SEQ ID NO: 1968 - RNA, 21 nt, Homo sapiens
aucugcaggcggaggcggcgg

SEQ ID NO: 1969 - RNA, 21 nt, Homo sapiens
uaucugcaggcggaggcggcg

SEQ ID NO: 1970 - RNA, 21 nt, Homo sapiens
uuaucugcaggcggaggcggc

SEQ ID NO: 1971 - RNA, 21 nt, Homo sapiens
guuaucugcaggcggaggcgg

SEQ ID NO: 1972 - RNA, 21 nt, Homo sapiens
gguuaucugcaggcggaggcg

SEQ ID NO: 1973 - RNA, 21 nt, Homo sapiens
ggguuaucugcaggcggaggc

SEQ ID NO: 1974 - RNA, 21 nt, Homo sapiens
cggguuaucugcaggcggagg

SEQ ID NO: 1975 - RNA, 21 nt, Homo sapiens
ccggguuaucugcaggcggag

SEQ ID NO: 1976 - RNA, 21 nt, Homo sapiens
uccggguuaucugcaggcgga

SEQ ID NO: 1977 - RNA, 21 nt, Homo sapiens
guccggguuaucugcaggcgg

SEQ ID NO: 1978 - RNA, 21 nt, Homo sapiens
gguccggguuaucugcaggcg

SEQ ID NO: 1979 - RNA, 21 nt, Homo sapiens
ggguccggguuaucugcaggc

SEQ ID NO: 1980 - RNA, 21 nt, Homo sapiens
aggguccggguuaucugcagg

SEQ ID NO: 1981 - RNA, 21 nt, Homo sapiens
caggguccggguuaucugcag

SEQ ID NO: 1982 - RNA, 21 nt, Homo sapiens
ccaggguccggguuaucugca

SEQ ID NO: 1983 - RNA, 21 nt, Homo sapiens
accaggguccggguuaucugc

SEQ ID NO: 1984 - RNA, 21 nt, Homo sapiens
cacaaaggcucgggcagccac

SEQ ID NO: 1985 - RNA, 21 nt, Homo sapiens
gcacaaaggcucgggcagcca

SEQ ID NO: 1986 - RNA, 21 nt, Homo sapiens
ugcacaaaggcucgggcagcc

SEQ ID NO: 1987 - RNA, 21 nt, Homo sapiens
cugcacaaaggcucgggcagc

SEQ ID NO: 1988 - RNA, 21 nt, Homo sapiens
ccugcacaaaggcucgggcag

SEQ ID NO: 1989 - RNA, 21 nt, Homo sapiens
cccugcacaaaggcucgggca

SEQ ID NO: 1990 - RNA, 21 nt, Homo sapiens
gcccugcacaaaggcucgggc

SEQ ID NO: 1991 - RNA, 21 nt, Homo sapiens
ggcccugcacaaaggcucggg

SEQ ID NO: 1992 - RNA, 21 nt, Homo sapiens
aggcccugcacaaaggcucgg

SEQ ID NO: 1993 - RNA, 21 nt, Homo sapiens
caggcccugcacaaaggcucg

SEQ ID NO: 1994 - RNA, 21 nt, Homo sapiens
ccaggcccugcacaaaggcuc

SEQ ID NO: 1995 - RNA, 21 nt, Homo sapiens
uccaggcccugcacaaaggcu

SEQ ID NO: 1996 - RNA, 21 nt, Homo sapiens
cuccaggcccugcacaaaggc

SEQ ID NO: 1997 - RNA, 21 nt, Homo sapiens
ucuccaggcccugcacaaagg

SEQ ID NO: 1998 - RNA, 21 nt, Homo sapiens
gucuccaggcccugcacaaag

SEQ ID NO: 1999 - RNA, 21 nt, Homo sapiens
agucuccaggcccugcacaaa

SEQ ID NO: 2000 - RNA, 21 nt, Homo sapiens
cagucuccaggcccugcacaa

SEQ ID NO: 2001 - RNA, 21 nt, Homo sapiens
ccagucuccaggcccugcaca

SEQ ID NO: 2002 - RNA, 21 nt, Homo sapiens
uccagucuccaggcccugcac

SEQ ID NO: 2003 - RNA, 21 nt, Homo sapiens
uuccagucuccaggcccugca

SEQ ID NO: 2004 - RNA, 21 nt, Homo sapiens
cuuccagucuccaggcccugc

SEQ ID NO: 2005 - RNA, 21 nt, Homo sapiens
ucuuccagucuccaggcccug

SEQ ID NO: 2006 - RNA, 21 nt, Homo sapiens
uucuuccagucuccaggcccu

SEQ ID NO: 2007 - RNA, 21 nt, Homo sapiens
uuucuuccagucuccaggccc

SEQ ID NO: 2008 - RNA, 21 nt, Homo sapiens
auuucuuccagucuccaggcc

SEQ ID NO: 2009 - RNA, 21 nt, Homo sapiens
cauuucuuccagucuccaggc

SEQ ID NO: 2010 - RNA, 21 nt, Homo sapiens
acauuucuuccagucuccagg

SEQ ID NO: 2011 - RNA, 21 nt, Homo sapiens
cacauuucuuccagucuccag

SEQ ID NO: 2012 - RNA, 21 nt, Homo sapiens
ccacauuucuuccagucucca

SEQ ID NO: 2013 - RNA, 21 nt, Homo sapiens
accacauuucuuccagucucc

SEQ ID NO: 2014 - RNA, 21 nt, Homo sapiens
gaccacauuucuuccagucuc

SEQ ID NO: 2015 - RNA, 21 nt, Homo sapiens
ugaccacauuucuuccagucu

SEQ ID NO: 2016 - RNA, 21 nt, Homo sapiens
cugaccacauuucuuccaguc

SEQ ID NO: 2017 - RNA, 21 nt, Homo sapiens
gcugaccacauuucuuccagu

SEQ ID NO: 2018 - RNA, 21 nt, Homo sapiens
cgcugaccacauuucuuccag

SEQ ID NO: 2019 - RNA, 21 nt, Homo sapiens
ucgcugaccacauuucuucca

SEQ ID NO: 2020 - RNA, 21 nt, Homo sapiens
uucgcugaccacauuucuucc

SEQ ID NO: 2021 - RNA, 21 nt, Homo sapiens
cuucgcugaccacauuucuuc

SEQ ID NO: 2022 - RNA, 21 nt, Homo sapiens
gcuucgcugaccacauuucuu

SEQ ID NO: 2023 - RNA, 21 nt, Homo sapiens
cgcuucgcugaccacauuucu

SEQ ID NO: 2024 - RNA, 21 nt, Homo sapiens
gcgcuucgcugaccacauuuc

SEQ ID NO: 2025 - RNA, 21 nt, Homo sapiens
agcgcuucgcugaccacauuu

SEQ ID NO: 2026 - RNA, 21 nt, Homo sapiens
aagcgcuucgcugaccacauu

SEQ ID NO: 2027 - RNA, 21 nt, Homo sapiens
uaagcgcuucgcugaccacau

SEQ ID NO: 2028 - RNA, 21 nt, Homo sapiens
uuaagcgcuucgcugaccaca

SEQ ID NO: 2029 - RNA, 21 nt, Homo sapiens
cuuaagcgcuucgcugaccac

SEQ ID NO: 2030 - RNA, 21 nt, Homo sapiens
ccuuaagcgcuucgcugacca

SEQ ID NO: 2031 - RNA, 21 nt, Homo sapiens
accuuaagcgcuucgcugacc

SEQ ID NO: 2032 - RNA, 21 nt, Homo sapiens
caccuuaagcgcuucgcugac

SEQ ID NO: 2033 - RNA, 21 nt, Homo sapiens
gcaccuuaagcgcuucgcuga

SEQ ID NO: 2034 - RNA, 21 nt, Homo sapiens
ggcaccuuaagcgcuucgcug

SEQ ID NO: 2035 - RNA, 21 nt, Homo sapiens
cggcaccuuaagcgcuucgcu

SEQ ID NO: 2036 - RNA, 21 nt, Homo sapiens
ccggcaccuuaagcgcuucgc

SEQ ID NO: 2037 - RNA, 21 nt, Homo sapiens
accggcaccuuaagcgcuucg

SEQ ID NO: 2038 - RNA, 21 nt, Homo sapiens
caccggcaccuuaagcgcuuc

SEQ ID NO: 2039 - RNA, 21 nt, Homo sapiens
acaccggcaccuuaagcgcuu

SEQ ID NO: 2040 - RNA, 21 nt, Homo sapiens
gacaccggcaccuuaagcgcu

SEQ ID NO: 2041 - RNA, 21 nt, Homo sapiens
agacaccggcaccuuaagcgc

SEQ ID NO: 2042 - RNA, 21 nt, Homo sapiens
cagacaccggcaccuuaagcg

SEQ ID NO: 2043 - RNA, 21 nt, Homo sapiens
ucagacaccggcaccuuaagc

SEQ ID NO: 2044 - RNA, 21 nt, Homo sapiens
uucagacaccggcaccuuaag

SEQ ID NO: 2045 - RNA, 21 nt, Homo sapiens
cuucagacaccggcaccuuaa

SEQ ID NO: 2046 - RNA, 21 nt, Homo sapiens
ccuucagacaccggcaccuua

SEQ ID NO: 2047 - RNA, 21 nt, Homo sapiens
gccuucagacaccggcaccuu

SEQ ID NO: 2048 - RNA, 21 nt, Homo sapiens
agccuucagacaccggcaccu

SEQ ID NO: 2049 - RNA, 21 nt, Homo sapiens
cagccuucagacaccggcacc

SEQ ID NO: 2050 - RNA, 21 nt, Homo sapiens
gcagccuucagacaccggcac

SEQ ID NO: 2051 - RNA, 21 nt, Homo sapiens
ugcagccuucagacaccggca

SEQ ID NO: 2052 - RNA, 21 nt, Homo sapiens
cugcagccuucagacaccggc

SEQ ID NO: 2053 - RNA, 21 nt, Homo sapiens
gcugcagccuucagacaccgg

SEQ ID NO: 2054 - RNA, 21 nt, Homo sapiens
ggcugcagccuucagacaccg

SEQ ID NO: 2055 - RNA, 21 nt, Homo sapiens
augagacgcaucagagccugg

SEQ ID NO: 2056 - RNA, 21 nt, Homo sapiens
gaugagacgcaucagagccug

SEQ ID NO: 2057 - RNA, 21 nt, Homo sapiens
cgaugagacgcaucagagccu

SEQ ID NO: 2058 - RNA, 21 nt, Homo sapiens
ccgaugagacgcaucagagcc

SEQ ID NO: 2059 - RNA, 21 nt, Homo sapiens
gccgaugagacgcaucagagc

SEQ ID NO: 2060 - RNA, 21 nt, Homo sapiens
agccgaugagacgcaucagag

SEQ ID NO: 2061 - RNA, 21 nt, Homo sapiens
cagccgaugagacgcaucaga

SEQ ID NO: 2062 - RNA, 21 nt, Homo sapiens
acagccgaugagacgcaucag

SEQ ID NO: 2063 - RNA, 21 nt, Homo sapiens
gacagccgaugagacgcauca

SEQ ID NO: 2064 - RNA, 21 nt, Homo sapiens
ggcagggcauaagugagggga

SEQ ID NO: 2065 - RNA, 21 nt, Homo sapiens
acguugaggcagaagcccugg

SEQ ID NO: 2066 - RNA, 21 nt, Homo sapiens
cacguugaggcagaagcccug

SEQ ID NO: 2067 - RNA, 21 nt, Homo sapiens
ccacguugaggcagaagcccu

SEQ ID NO: 2068 - RNA, 21 nt, Homo sapiens
accacguugaggcagaagccc

SEQ ID NO: 2069 - RNA, 21 nt, Homo sapiens
aaccacguugaggcagaagcc

SEQ ID NO: 2070 - RNA, 21 nt, Homo sapiens
gaaccacguugaggcagaagc

SEQ ID NO: 2071 - RNA, 21 nt, Homo sapiens
cgaaccacguugaggcagaag

SEQ ID NO: 2072 - RNA, 21 nt, Homo sapiens
acgaaccacguugaggcagaa

SEQ ID NO: 2073 - RNA, 21 nt, Homo sapiens
accauccagauaguugcccca

SEQ ID NO: 2074 - RNA, 21 nt, Homo sapiens
gaccauccagauaguugcccc

SEQ ID NO: 2075 - RNA, 21 nt, Homo sapiens
agaccauccagauaguugccc

SEQ ID NO: 2076 - RNA, 21 nt, Homo sapiens
gagaccauccagauaguugcc

SEQ ID NO: 2077 - RNA, 21 nt, Homo sapiens
ggagaccauccagauaguugc

SEQ ID NO: 2078 - RNA, 21 nt, Homo sapiens
aggagaccauccagauaguug

SEQ ID NO: 2079 - RNA, 21 nt, Homo sapiens
caggagaccauccagauaguu

SEQ ID NO: 2080 - RNA, 21 nt, Homo sapiens
ucaggagaccauccagauagu

SEQ ID NO: 2081 - RNA, 21 nt, Homo sapiens
aucaggagaccauccagauag

SEQ ID NO: 2082 - RNA, 21 nt, Homo sapiens
gaucaggagaccauccagaua

SEQ ID NO: 2083 - RNA, 21 nt, Homo sapiens
ggaucaggagaccauccagau

SEQ ID NO: 2084 - RNA, 21 nt, Homo sapiens
aggaucaggagaccauccaga

SEQ ID NO: 2085 - RNA, 21 nt, Homo sapiens
gcccuggagcuuaucagccag

SEQ ID NO: 2086 - RNA, 21 nt, Homo sapiens
gccgucagcucaaaggaaaag

SEQ ID NO: 2087 - RNA, 21 nt, Homo sapiens
ggccgucagcucaaaggaaaa

SEQ ID NO: 2088 - RNA, 21 nt, Homo sapiens
cggccgucagcucaaaggaaa

SEQ ID NO: 2089 - RNA, 21 nt, Homo sapiens
ucggccgucagcucaaaggaa

SEQ ID NO: 2090 - RNA, 21 nt, Homo sapiens
cucggccgucagcucaaagga

SEQ ID NO: 2091 - RNA, 21 nt, Homo sapiens
acucggccgucagcucaaagg

SEQ ID NO: 2092 - RNA, 21 nt, Homo sapiens
gacucggccgucagcucaaag

SEQ ID NO: 2093 - RNA, 21 nt, Homo sapiens
ggacucggccgucagcucaaa

SEQ ID NO: 2094 - RNA, 21 nt, Homo sapiens
uggacucggccgucagcucaa

SEQ ID NO: 2095 - RNA, 21 nt, Homo sapiens
auggacucggccgucagcuca

SEQ ID NO: 2096 - RNA, 21 nt, Homo sapiens
aauggacucggccgucagcuc

SEQ ID NO: 2097 - RNA, 21 nt, Homo sapiens
caauggacucggccgucagcu

SEQ ID NO: 2098 - RNA, 21 nt, Homo sapiens
cccuccgagaucuucacccca

SEQ ID NO: 2099 - RNA, 21 nt, Homo sapiens
acccuccgagaucuucacccc

SEQ ID NO: 2100 - RNA, 21 nt, Homo sapiens
aacccuccgagaucuucaccc

SEQ ID NO: 2101 - RNA, 21 nt, Homo sapiens
aaacccuccgagaucuucacc

SEQ ID NO: 2102 - RNA, 21 nt, Homo sapiens
caaacccuccgagaucuucac

SEQ ID NO: 2103 - RNA, 21 nt, Homo sapiens
ucaaacccuccgagaucuuca

SEQ ID NO: 2104 - RNA, 21 nt, Homo sapiens
aucaaacccuccgagaucuuc

SEQ ID NO: 2105 - RNA, 21 nt, Homo sapiens
caucaaacccuccgagaucuu

SEQ ID NO: 2106 - RNA, 21 nt, Homo sapiens
acaucaaacccuccgagaucu

SEQ ID NO: 2107 - RNA, 21 nt, Homo sapiens
uacaucaaacccuccgagauc

SEQ ID NO: 2108 - RNA, 21 nt, Homo sapiens
guacaucaaacccuccgagau

SEQ ID NO: 2109 - RNA, 21 nt, Homo sapiens
gguacaucaaacccuccgaga

SEQ ID NO: 2110 - RNA, 21 nt, Homo sapiens
agguacaucaaacccuccgag

SEQ ID NO: 2111 - RNA, 21 nt, Homo sapiens
cagguacaucaaacccuccga

SEQ ID NO: 2112 - RNA, 21 nt, Homo sapiens
gcagguacaucaaacccuccg

SEQ ID NO: 2113 - RNA, 21 nt, Homo sapiens
ugcagguacaucaaacccucc

SEQ ID NO: 2114 - RNA, 21 nt, Homo sapiens
cugcagguacaucaaacccuc

SEQ ID NO: 2115 - RNA, 21 nt, Homo sapiens
ccugcagguacaucaaacccu

SEQ ID NO: 2116 - RNA, 21 nt, Homo sapiens
uccugcagguacaucaaaccc

SEQ ID NO: 2117 - RNA, 21 nt, Homo sapiens
ggacaccuucgcacuguuuuc

SEQ ID NO: 2118 - RNA, 21 nt, Homo sapiens
cggacaccuucgcacuguuuu

SEQ ID NO: 2119 - RNA, 21 nt, Homo sapiens
gcggacaccuucgcacuguuu

SEQ ID NO: 2120 - RNA, 21 nt, Homo sapiens
ggcggacaccuucgcacuguu

SEQ ID NO: 2121 - RNA, 21 nt, Homo sapiens
gggcggacaccuucgcacugu

SEQ ID NO: 2122 - RNA, 21 nt, Homo sapiens
ugggcggacaccuucgcacug

SEQ ID NO: 2123 - RNA, 21 nt, Homo sapiens
cugggcggacaccuucgcacu

SEQ ID NO: 2124 - RNA, 21 nt, Homo sapiens
ccugggcggacaccuucgcac

SEQ ID NO: 2125 - RNA, 21 nt, Homo sapiens
accugggcggacaccuucgca

SEQ ID NO: 2126 - RNA, 21 nt, Homo sapiens
caccugggcggacaccuucgc

SEQ ID NO: 2127 - RNA, 21 nt, Homo sapiens
acaccugggcggacaccuucg

SEQ ID NO: 2128 - RNA, 21 nt, Homo sapiens
aacaccugggcggacaccuuc

SEQ ID NO: 2129 - RNA, 21 nt, Homo sapiens
aaacaccugggcggacaccuu

SEQ ID NO: 2130 - RNA, 21 nt, Homo sapiens
gaaacaccugggcggacaccu

SEQ ID NO: 2131 - RNA, 21 nt, Homo sapiens
ugaaacaccugggcggacacc

SEQ ID NO: 2132 - RNA, 21 nt, Homo sapiens
cugaaacaccugggcggacac

SEQ ID NO: 2133 - RNA, 21 nt, Homo sapiens
ccugaaacaccugggcggaca

SEQ ID NO: 2134 - RNA, 21 nt, Homo sapiens
uccugaaacaccugggcggac

SEQ ID NO: 2135 - RNA, 21 nt, Homo sapiens
cuccugaaacaccugggcgga

SEQ ID NO: 2136 - RNA, 21 nt, Homo sapiens
acuccugaaacaccugggcgg

SEQ ID NO: 2137 - RNA, 21 nt, Homo sapiens
cacuccugaaacaccugggcg

SEQ ID NO: 2138 - RNA, 21 nt, Homo sapiens
gcacuccugaaacaccugggc

SEQ ID NO: 2139 - RNA, 21 nt, Homo sapiens
cgcacuccugaaacaccuggg

SEQ ID NO: 2140 - RNA, 21 nt, Homo sapiens
ccgcacuccugaaacaccugg

SEQ ID NO: 2141 - RNA, 21 nt, Homo sapiens
gccgcacuccugaaacaccug

SEQ ID NO: 2142 - RNA, 21 nt, Homo sapiens
gggcaggcaccgggucggggg

SEQ ID NO: 2143 - RNA, 21 nt, Homo sapiens
cgggcaggcaccgggucgggg

SEQ ID NO: 2144 - RNA, 21 nt, Homo sapiens
gcgggcaggcaccgggucggg

SEQ ID NO: 2145 - RNA, 21 nt, Homo sapiens
ugcgggcaggcaccgggucgg

SEQ ID NO: 2146 - RNA, 21 nt, Homo sapiens
uugcgggcaggcaccgggucg

SEQ ID NO: 2147 - RNA, 21 nt, Homo sapiens
guugcgggcaggcaccggguc

SEQ ID NO: 2148 - RNA, 21 nt, Homo sapiens
gguugcgggcaggcaccgggu

SEQ ID NO: 2149 - RNA, 21 nt, Homo sapiens
cgguugcgggcaggcaccggg

SEQ ID NO: 2150 - RNA, 21 nt, Homo sapiens
acgguugcgggcaggcaccgg

SEQ ID NO: 2151 - RNA, 21 nt, Homo sapiens
gacgguugcgggcaggcaccg

SEQ ID NO: 2152 - RNA, 21 nt, Homo sapiens
cgacgguugcgggcaggcacc

SEQ ID NO: 2153 - RNA, 21 nt, Homo sapiens
ucgacgguugcgggcaggcac

SEQ ID NO: 2154 - RNA, 21 nt, Homo sapiens
cucgacgguugcgggcaggca

SEQ ID NO: 2155 - RNA, 21 nt, Homo sapiens
gcucgacgguugcgggcaggc

SEQ ID NO: 2156 - RNA, 21 nt, Homo sapiens
cggcccgccucuucccggggc

SEQ ID NO: 2157 - RNA, 21 nt, Homo sapiens
ccggcccgccucuucccgggg

SEQ ID NO: 2158 - RNA, 21 nt, Homo sapiens
gccggcccgccucuucccggg

SEQ ID NO: 2159 - RNA, 21 nt, Homo sapiens
agccggcccgccucuucccgg

SEQ ID NO: 2160 - RNA, 21 nt, Homo sapiens
cagccggcccgccucuucccg

SEQ ID NO: 2161 - RNA, 21 nt, Homo sapiens
acagccggcccgccucuuccc

SEQ ID NO: 2162 - RNA, 21 nt, Homo sapiens
cacagccggcccgccucuucc

SEQ ID NO: 2163 - RNA, 21 nt, Homo sapiens
ccacagccggcccgccucuuc

SEQ ID NO: 2164 - RNA, 21 nt, Homo sapiens
accacagccggcccgccucuu

SEQ ID NO: 2165 - RNA, 21 nt, Homo sapiens
gaccacagccggcccgccucu

SEQ ID NO: 2166 - RNA, 21 nt, Homo sapiens
cgaccacagccggcccgccuc

SEQ ID NO: 2167 - RNA, 21 nt, Homo sapiens
ucgaccacagccggcccgccu

SEQ ID NO: 2168 - RNA, 21 nt, Homo sapiens
aucgaccacagccggcccgcc

SEQ ID NO: 2169 - RNA, 21 nt, Homo sapiens
caucgaccacagccggcccgc

SEQ ID NO: 2170 - RNA, 21 nt, Homo sapiens
ccaucgaccacagccggcccg

SEQ ID NO: 2171 - RNA, 21 nt, Homo sapiens
accaucgaccacagccggccc

SEQ ID NO: 2172 - RNA, 21 nt, Homo sapiens
caccaucgaccacagccggcc

SEQ ID NO: 2173 - RNA, 21 nt, Homo sapiens
ucaccaucgaccacagccggc

SEQ ID NO: 2174 - RNA, 21 nt, Homo sapiens
gucaccaucgaccacagccgg

SEQ ID NO: 2175 - RNA, 21 nt, Homo sapiens
ggucaccaucgaccacagccg

SEQ ID NO: 2176 - RNA, 21 nt, Homo sapiens
cggucaccaucgaccacagcc

SEQ ID NO: 2177 - RNA, 21 nt, Homo sapiens
ucggucaccaucgaccacagc

SEQ ID NO: 2178 - RNA, 21 nt, Homo sapiens
cucggucaccaucgaccacag

SEQ ID NO: 2179 - RNA, 21 nt, Homo sapiens
ccucggucaccaucgaccaca

SEQ ID NO: 2180 - RNA, 21 nt, Homo sapiens
uccucggucaccaucgaccac

SEQ ID NO: 2181 - RNA, 21 nt, Homo sapiens
cuccucggucaccaucgacca

SEQ ID NO: 2182 - RNA, 21 nt, Homo sapiens
ccuccucggucaccaucgacc

SEQ ID NO: 2183 - RNA, 21 nt, Homo sapiens
uccuccucggucaccaucgac

SEQ ID NO: 2184 - RNA, 21 nt, Homo sapiens
cuccuccucggucaccaucga

SEQ ID NO: 2185 - RNA, 21 nt, Homo sapiens
gcuccuccucggucaccaucg

SEQ ID NO: 2186 - RNA, 21 nt, Homo sapiens
cgcuccuccucggucaccauc

SEQ ID NO: 2187 - RNA, 21 nt, Homo sapiens
ccgcuccuccucggucaccau

SEQ ID NO: 2188 - RNA, 21 nt, Homo sapiens
gccgcuccuccucggucacca

SEQ ID NO: 2189 - RNA, 21 nt, Homo sapiens
ggccgcuccuccucggucacc

SEQ ID NO: 2190 - RNA, 21 nt, Homo sapiens
gggccgcuccuccucggucac

SEQ ID NO: 2191 - RNA, 21 nt, Homo sapiens
ugggccgcuccuccucgguca

SEQ ID NO: 2192 - RNA, 21 nt, Homo sapiens
gugggccgcuccuccucgguc

SEQ ID NO: 2193 - RNA, 21 nt, Homo sapiens
cgugggccgcuccuccucggu

SEQ ID NO: 2194 - RNA, 21 nt, Homo sapiens
ucgugggccgcuccuccucgg

SEQ ID NO: 2195 - RNA, 21 nt, Homo sapiens
gucgugggccgcuccuccucg

SEQ ID NO: 2196 - RNA, 21 nt, Homo sapiens
cgucgugggccgcuccuccuc

SEQ ID NO: 2197 - RNA, 21 nt, Homo sapiens
ccgucgugggccgcuccuccu

SEQ ID NO: 2198 - RNA, 21 nt, Homo sapiens
gccgucgugggccgcuccucc

SEQ ID NO: 2199 - RNA, 21 nt, Homo sapiens
ggccgucgugggccgcuccuc

SEQ ID NO: 2200 - RNA, 21 nt, Homo sapiens
cggccgucgugggccgcuccu

SEQ ID NO: 2201 - RNA, 21 nt, Homo sapiens
gcggccgucgugggccgcucc

SEQ ID NO: 2202 - RNA, 21 nt, Homo sapiens
ugcggccgucgugggccgcuc

SEQ ID NO: 2203 - RNA, 21 nt, Homo sapiens
cugcggccgucgugggccgcu

SEQ ID NO: 2204 - RNA, 21 nt, Homo sapiens
ccugcggccgucgugggccgc

SEQ ID NO: 2205 - RNA, 21 nt, Homo sapiens
gccugcggccgucgugggccg

SEQ ID NO: 2206 - RNA, 21 nt, Homo sapiens
ugccugcggccgucgugggcc

SEQ ID NO: 2207 - RNA, 21 nt, Homo sapiens
gugccugcggccgucgugggc

SEQ ID NO: 2208 - RNA, 21 nt, Homo sapiens
ggugccugcggccgucguggg

SEQ ID NO: 2209 - RNA, 21 nt, Homo sapiens
uggugccugcggccgucgugg

SEQ ID NO: 2210 - RNA, 21 nt, Homo sapiens
uuggugccugcggccgucgug

SEQ ID NO: 2211 - RNA, 21 nt, Homo sapiens
guuggugccugcggccgucgu

SEQ ID NO: 2212 - RNA, 21 nt, Homo sapiens
gguuggugccugcggccgucg

SEQ ID NO: 2213 - RNA, 21 nt, Homo sapiens
agguuggugccugcggccguc

SEQ ID NO: 2214 - RNA, 21 nt, Homo sapiens
cagguuggugccugcggccgu

SEQ ID NO: 2215 - RNA, 21 nt, Homo sapiens
gcagguuggugccugcggccg

SEQ ID NO: 2216 - RNA, 21 nt, Homo sapiens
ugcagguuggugccugcggcc

SEQ ID NO: 2217 - RNA, 21 nt, Homo sapiens
gugcagguuggugccugcggc

SEQ ID NO: 2218 - RNA, 21 nt, Homo sapiens
ggugcagguuggugccugcgg

SEQ ID NO: 2219 - RNA, 21 nt, Homo sapiens
cggugcagguuggugccugcg

SEQ ID NO: 2220 - RNA, 21 nt, Homo sapiens
ccggugcagguuggugccugc

SEQ ID NO: 2221 - RNA, 21 nt, Homo sapiens
gccggugcagguuggugccug

SEQ ID NO: 2222 - RNA, 21 nt, Homo sapiens
agccggugcagguuggugccu

SEQ ID NO: 2223 - RNA, 21 nt, Homo sapiens
cagccggugcagguuggugcc

SEQ ID NO: 2224 - RNA, 21 nt, Homo sapiens
ccagccggugcagguuggugc

SEQ ID NO: 2225 - RNA, 21 nt, Homo sapiens
accagccggugcagguuggug

SEQ ID NO: 2226 - RNA, 21 nt, Homo sapiens
caccagccggugcagguuggu

SEQ ID NO: 2227 - RNA, 21 nt, Homo sapiens
acaccagccggugcagguugg

SEQ ID NO: 2228 - RNA, 21 nt, Homo sapiens
cacaccagccggugcagguug

SEQ ID NO: 2229 - RNA, 21 nt, Homo sapiens
ccacaccagccggugcagguu

SEQ ID NO: 2230 - RNA, 21 nt, Homo sapiens
cccacaccagccggugcaggu

SEQ ID NO: 2231 - RNA, 21 nt, Homo sapiens
ucccacaccagccggugcagg

SEQ ID NO: 2232 - RNA, 21 nt, Homo sapiens
cucccacaccagccggugcag

SEQ ID NO: 2233 - RNA, 21 nt, Homo sapiens
gcucccacaccagccggugca

SEQ ID NO: 2234 - RNA, 21 nt, Homo sapiens
agcucccacaccagccggugc

SEQ ID NO: 2235 - RNA, 21 nt, Homo sapiens
gagcucccacaccagccggug

SEQ ID NO: 2236 - RNA, 21 nt, Homo sapiens
ggagcucccacaccagccggu

SEQ ID NO: 2237 - RNA, 21 nt, Homo sapiens
cggagcucccacaccagccgg

SEQ ID NO: 2238 - RNA, 21 nt, Homo sapiens
gcggagcucccacaccagccg

SEQ ID NO: 2239 - RNA, 21 nt, Homo sapiens
cgcggagcucccacaccagcc

SEQ ID NO: 2240 - RNA, 21 nt, Homo sapiens
ucgcggagcucccacaccagc

SEQ ID NO: 2241 - RNA, 21 nt, Homo sapiens
cucgcggagcucccacaccag

SEQ ID NO: 2242 - RNA, 21 nt, Homo sapiens
gcucgcggagcucccacacca

SEQ ID NO: 2243 - RNA, 21 nt, Homo sapiens
cgcucgcggagcucccacacc

SEQ ID NO: 2244 - RNA, 21 nt, Homo sapiens
acgcucgcggagcucccacac

SEQ ID NO: 2245 - RNA, 21 nt, Homo sapiens
gacgcucgcggagcucccaca

SEQ ID NO: 2246 - RNA, 21 nt, Homo sapiens
agacgcucgcggagcucccac

SEQ ID NO: 2247 - RNA, 21 nt, Homo sapiens
cagccgggcccagaagccccg

SEQ ID NO: 2248 - RNA, 21 nt, Homo sapiens
acagccgggcccagaagcccc

SEQ ID NO: 2249 - RNA, 21 nt, Homo sapiens
gacagccgggcccagaagccc

SEQ ID NO: 2250 - RNA, 21 nt, Homo sapiens
ggacagccgggcccagaagcc

SEQ ID NO: 2251 - RNA, 21 nt, Homo sapiens
gggacagccgggcccagaagc

SEQ ID NO: 2252 - RNA, 21 nt, Homo sapiens
agggacagccgggcccagaag

SEQ ID NO: 2253 - RNA, 21 nt, Homo sapiens
cagggacagccgggcccagaa

SEQ ID NO: 2254 - RNA, 21 nt, Homo sapiens
ucagggacagccgggcccaga

SEQ ID NO: 2255 - RNA, 21 nt, Homo sapiens
gucagggacagccgggcccag

SEQ ID NO: 2256 - RNA, 21 nt, Homo sapiens
cgucagggacagccgggccca

SEQ ID NO: 2257 - RNA, 21 nt, Homo sapiens
ccgucagggacagccgggccc

SEQ ID NO: 2258 - RNA, 21 nt, Homo sapiens
accgucagggacagccgggcc

SEQ ID NO: 2259 - RNA, 21 nt, Homo sapiens
caccgucagggacagccgggc

SEQ ID NO: 2260 - RNA, 21 nt, Homo sapiens
acaccgucagggacagccggg

SEQ ID NO: 2261 - RNA, 21 nt, Homo sapiens
cacaccgucagggacagccgg

SEQ ID NO: 2262 - RNA, 21 nt, Homo sapiens
gcacaccgucagggacagccg

SEQ ID NO: 2263 - RNA, 21 nt, Homo sapiens
cgcacaccgucagggacagcc

SEQ ID NO: 2264 - RNA, 21 nt, Homo sapiens
ccgcacaccgucagggacagc

SEQ ID NO: 2265 - RNA, 21 nt, Homo sapiens
uccgcacaccgucagggacag

SEQ ID NO: 2266 - RNA, 21 nt, Homo sapiens
cuccgcacaccgucagggaca

SEQ ID NO: 2267 - RNA, 21 nt, Homo sapiens
ucuccgcacaccgucagggac

SEQ ID NO: 2268 - RNA, 21 nt, Homo sapiens
gucuccgcacaccgucaggga

SEQ ID NO: 2269 - RNA, 21 nt, Homo sapiens
agucuccgcacaccgucaggg

SEQ ID NO: 2270 - RNA, 21 nt, Homo sapiens
gagucuccgcacaccgucagg

SEQ ID NO: 2271 - RNA, 21 nt, Homo sapiens
agagucuccgcacaccgucag

SEQ ID NO: 2272 - RNA, 21 nt, Homo sapiens
gagagucuccgcacaccguca

SEQ ID NO: 2273 - RNA, 21 nt, Homo sapiens
cgagagucuccgcacaccguc

SEQ ID NO: 2274 - RNA, 21 nt, Homo sapiens
gcgagagucuccgcacaccgu

SEQ ID NO: 2275 - RNA, 21 nt, Homo sapiens
ugcgagagucuccgcacaccg

SEQ ID NO: 2276 - RNA, 21 nt, Homo sapiens
augcgagagucuccgcacacc

SEQ ID NO: 2277 - RNA, 21 nt, Homo sapiens
cagcgaggcguccgcugccau

SEQ ID NO: 2278 - RNA, 21 nt, Homo sapiens
ccagcgaggcguccgcugcca

SEQ ID NO: 2279 - RNA, 21 nt, Homo sapiens
uccagcgaggcguccgcugcc

SEQ ID NO: 2280 - RNA, 21 nt, Homo sapiens
cuccagcgaggcguccgcugc

SEQ ID NO: 2281 - RNA, 21 nt, Homo sapiens
ccuccagcgaggcguccgcug

SEQ ID NO: 2282 - RNA, 21 nt, Homo sapiens
gccuccagcgaggcguccgcu

SEQ ID NO: 2283 - RNA, 21 nt, Homo sapiens
cgccuccagcgaggcguccgc

SEQ ID NO: 2284 - RNA, 21 nt, Homo sapiens
ccgccuccagcgaggcguccg

SEQ ID NO: 2285 - RNA, 21 nt, Homo sapiens
gccgccuccagcgaggcgucc

SEQ ID NO: 2286 - RNA, 21 nt, Homo sapiens
cgccgccuccagcgaggcguc

SEQ ID NO: 2287 - RNA, 21 nt, Homo sapiens
gcgccgccuccagcgaggcgu

SEQ ID NO: 2288 - RNA, 21 nt, Homo sapiens
ggcgccgccuccagcgaggcg

SEQ ID NO: 2289 - RNA, 21 nt, Homo sapiens
gggcgccgccuccagcgaggc

SEQ ID NO: 2290 - RNA, 21 nt, Homo sapiens
agggcgccgccuccagcgagg

SEQ ID NO: 2291 - RNA, 21 nt, Homo sapiens
cagggcgccgccuccagcgag

SEQ ID NO: 2292 - RNA, 21 nt, Homo sapiens
gcagggcgccgccuccagcga

SEQ ID NO: 2293 - RNA, 21 nt, Homo sapiens
agcagggcgccgccuccagcg

SEQ ID NO: 2294 - RNA, 21 nt, Homo sapiens
cagcagggcgccgccuccagc

SEQ ID NO: 2295 - RNA, 21 nt, Homo sapiens
ccagcagggcgccgccuccag

SEQ ID NO: 2296 - RNA, 21 nt, Homo sapiens
uccagcagggcgccgccucca

SEQ ID NO: 2297 - RNA, 21 nt, Homo sapiens
guccagcagggcgccgccucc

SEQ ID NO: 2298 - RNA, 21 nt, Homo sapiens
gguccagcagggcgccgccuc

SEQ ID NO: 2299 - RNA, 21 nt, Homo sapiens
cgguccagcagggcgccgccu

SEQ ID NO: 2300 - RNA, 21 nt, Homo sapiens
ccgguccagcagggcgccgcc

SEQ ID NO: 2301 - RNA, 21 nt, Homo sapiens
uccgguccagcagggcgccgc

SEQ ID NO: 2302 - RNA, 21 nt, Homo sapiens
cuccgguccagcagggcgccg

SEQ ID NO: 2303 - RNA, 21 nt, Homo sapiens
gcuccgguccagcagggcgcc

SEQ ID NO: 2304 - RNA, 21 nt, Homo sapiens
ggcuccgguccagcagggcgc

SEQ ID NO: 2305 - RNA, 21 nt, Homo sapiens
cggcuccgguccagcagggcg

SEQ ID NO: 2306 - RNA, 21 nt, Homo sapiens
ccggcuccgguccagcagggc

SEQ ID NO: 2307 - RNA, 21 nt, Homo sapiens
cccggcuccgguccagcaggg

SEQ ID NO: 2308 - RNA, 21 nt, Homo sapiens
gcccggcuccgguccagcagg

SEQ ID NO: 2309 - RNA, 21 nt, Homo sapiens
cgcccggcuccgguccagcag

SEQ ID NO: 2310 - RNA, 21 nt, Homo sapiens
guugaccugcucggccgggga

SEQ ID NO: 2311 - RNA, 21 nt, Homo sapiens
uguugaccugcucggccgggg

SEQ ID NO: 2312 - RNA, 21 nt, Homo sapiens
uuguugaccugcucggccggg

SEQ ID NO: 2313 - RNA, 21 nt, Homo sapiens
guuguugaccugcucggccgg

SEQ ID NO: 2314 - RNA, 21 nt, Homo sapiens
cguccaccuugagcucggggu

SEQ ID NO: 2315 - RNA, 21 nt, Homo sapiens
gcguccaccuugagcucgggg

SEQ ID NO: 2316 - RNA, 21 nt, Homo sapiens
ggcguccaccuugagcucggg

SEQ ID NO: 2317 - RNA, 21 nt, Homo sapiens
aggcguccaccuugagcucgg

SEQ ID NO: 2318 - RNA, 21 nt, Homo sapiens
gaggcguccaccuugagcucg

SEQ ID NO: 2319 - RNA, 21 nt, Homo sapiens
cgaggcguccaccuugagcuc

SEQ ID NO: 2320 - RNA, 21 nt, Homo sapiens
ccgaggcguccaccuugagcu

SEQ ID NO: 2321 - RNA, 21 nt, Homo sapiens
cccgaggcguccaccuugagc

SEQ ID NO: 2322 - RNA, 21 nt, Homo sapiens
gcccgaggcguccaccuugag

SEQ ID NO: 2323 - RNA, 21 nt, Homo sapiens
gccgugucgggacaucggggc

SEQ ID NO: 2324 - RNA, 21 nt, Homo sapiens
cgccgugucgggacaucgggg

SEQ ID NO: 2325 - RNA, 21 nt, Homo sapiens
ccgccgugucgggacaucggg

SEQ ID NO: 2326 - RNA, 21 nt, Homo sapiens
gccgccgugucgggacaucgg

SEQ ID NO: 2327 - RNA, 21 nt, Homo sapiens
cgccgccgugucgggacaucg

SEQ ID NO: 2328 - RNA, 21 nt, Homo sapiens
acgccgccgugucgggacauc

SEQ ID NO: 2329 - RNA, 21 nt, Homo sapiens
gacgccgccgugucgggacau

SEQ ID NO: 2330 - RNA, 21 nt, Homo sapiens
cgacgccgccgugucgggaca

SEQ ID NO: 2331 - RNA, 21 nt, Homo sapiens
ccgacgccgccgugucgggac

SEQ ID NO: 2332 - RNA, 21 nt, Homo sapiens
gccgacgccgccgugucggga

SEQ ID NO: 2333 - RNA, 21 nt, Homo sapiens
agccgacgccgccgugucggg

SEQ ID NO: 2334 - RNA, 21 nt, Homo sapiens
uagccgacgccgccgugucgg

SEQ ID NO: 2335 - RNA, 21 nt, Homo sapiens
guagccgacgccgccgugucg

SEQ ID NO: 2336 - RNA, 21 nt, Homo sapiens
uguagccgacgccgccguguc

SEQ ID NO: 2337 - RNA, 21 nt, Homo sapiens
cuguagccgacgccgccgugu

SEQ ID NO: 2338 - RNA, 21 nt, Homo sapiens
gcuguagccgacgccgccgug

SEQ ID NO: 2339 - RNA, 21 nt, Homo sapiens
agcuguagccgacgccgccgu

SEQ ID NO: 2340 - RNA, 21 nt, Homo sapiens
gagcuguagccgacgccgccg

SEQ ID NO: 2341 - RNA, 21 nt, Homo sapiens
ggagcuguagccgacgccgcc

SEQ ID NO: 2342 - RNA, 21 nt, Homo sapiens
cggagcuguagccgacgccgc

SEQ ID NO: 2343 - RNA, 21 nt, Homo sapiens
ccggagcuguagccgacgccg

SEQ ID NO: 2344 - RNA, 21 nt, Homo sapiens
cccggagcuguagccgacgcc

SEQ ID NO: 2345 - RNA, 21 nt, Homo sapiens
gcccggagcuguagccgacgc

SEQ ID NO: 2346 - RNA, 21 nt, Homo sapiens
cgcccggagcuguagccgacg

SEQ ID NO: 2347 - RNA, 21 nt, Homo sapiens
ccgcccggagcuguagccgac

SEQ ID NO: 2348 - RNA, 21 nt, Homo sapiens
gccgcccggagcuguagccga

SEQ ID NO: 2349 - RNA, 21 nt, Homo sapiens
ggccgcccggagcuguagccg

SEQ ID NO: 2350 - RNA, 21 nt, Homo sapiens
ugucccagugcggccguuuuc

SEQ ID NO: 2351 - RNA, 21 nt, Homo sapiens
gugucccagugcggccguuuu

SEQ ID NO: 2352 - RNA, 21 nt, Homo sapiens
cgugucccagugcggccguuu

SEQ ID NO: 2353 - RNA, 21 nt, Homo sapiens
ucgugucccagugcggccguu

SEQ ID NO: 2354 - RNA, 21 nt, Homo sapiens
gucgugucccagugcggccgu

SEQ ID NO: 2355 - RNA, 21 nt, Homo sapiens
ggucgugucccagugcggccg

SEQ ID NO: 2356 - RNA, 21 nt, Homo sapiens
aggucgugucccagugcggcc

SEQ ID NO: 2357 - RNA, 21 nt, Homo sapiens
caggucgugucccagugcggc

SEQ ID NO: 2358 - RNA, 21 nt, Homo sapiens
ccaggucgugucccagugcgg

SEQ ID NO: 2359 - RNA, 21 nt, Homo sapiens
uccaggucgugucccagugcg

SEQ ID NO: 2360 - RNA, 21 nt, Homo sapiens
guccaggucgugucccagugc

SEQ ID NO: 2361 - RNA, 21 nt, Homo sapiens
cguccaggucgugucccagug

SEQ ID NO: 2362 - RNA, 21 nt, Homo sapiens
ccguccaggucgugucccagu

SEQ ID NO: 2363 - RNA, 21 nt, Homo sapiens
cccguccaggucgugucccag

SEQ ID NO: 2364 - RNA, 21 nt, Homo sapiens
gcccguccaggucguguccca

SEQ ID NO: 2365 - RNA, 21 nt, Homo sapiens
ugcccguccaggucguguccc

SEQ ID NO: 2366 - RNA, 21 nt, Homo sapiens
cugcccguccaggucgugucc

SEQ ID NO: 2367 - RNA, 21 nt, Homo sapiens
ccugcccguccaggucguguc

SEQ ID NO: 2368 - RNA, 21 nt, Homo sapiens
uccugcccguccaggucgugu

SEQ ID NO: 2369 - RNA, 21 nt, Homo sapiens
guccugcccguccaggucgug

SEQ ID NO: 2370 - RNA, 21 nt, Homo sapiens
cguccugcccguccaggucgu

SEQ ID NO: 2371 - RNA, 21 nt, Homo sapiens
gcguccugcccguccaggucg

SEQ ID NO: 2372 - RNA, 21 nt, Homo sapiens
cgcguccugcccguccagguc

SEQ ID NO: 2373 - RNA, 21 nt, Homo sapiens
ccgcguccugcccguccaggu

SEQ ID NO: 2374 - RNA, 21 nt, Homo sapiens
uccgcguccugcccguccagg

SEQ ID NO: 2375 - RNA, 21 nt, Homo sapiens
auccgcguccugcccguccag

SEQ ID NO: 2376 - RNA, 21 nt, Homo sapiens
cauccgcguccugcccgucca

SEQ ID NO: 2377 - RNA, 21 nt, Homo sapiens
ucauccgcguccugcccgucc

SEQ ID NO: 2378 - RNA, 21 nt, Homo sapiens
cucauccgcguccugcccguc

SEQ ID NO: 2379 - RNA, 21 nt, Homo sapiens
ccucauccgcguccugcccgu

SEQ ID NO: 2380 - RNA, 21 nt, Homo sapiens
uccucauccgcguccugcccg

SEQ ID NO: 2381 - RNA, 21 nt, Homo sapiens
auccucauccgcguccugccc

SEQ ID NO: 2382 - RNA, 21 nt, Homo sapiens
cauccucauccgcguccugcc

SEQ ID NO: 2383 - RNA, 21 nt, Homo sapiens
gcauccucauccgcguccugc

SEQ ID NO: 2384 - RNA, 21 nt, Homo sapiens
ggcauccucauccgcguccug

SEQ ID NO: 2385 - RNA, 21 nt, Homo sapiens
aucugcauacugcuguccccc

SEQ ID NO: 2386 - RNA, 21 nt, Homo sapiens
caucugcauacugcugucccc

SEQ ID NO: 2387 - RNA, 21 nt, Homo sapiens
ucaucugcauacugcuguccc

SEQ ID NO: 2388 - RNA, 21 nt, Homo sapiens
gucaucugcauacugcugucc

SEQ ID NO: 2389 - RNA, 21 nt, Homo sapiens
agucaucugcauacugcuguc

SEQ ID NO: 2390 - RNA, 21 nt, Homo sapiens
cagucaucugcauacugcugu

SEQ ID NO: 2391 - RNA, 21 nt, Homo sapiens
ccagucaucugcauacugcug

SEQ ID NO: 2392 - RNA, 21 nt, Homo sapiens
uccagucaucugcauacugcu

SEQ ID NO: 2393 - RNA, 21 nt, Homo sapiens
auccagucaucugcauacugc

SEQ ID NO: 2394 - RNA, 21 nt, Homo sapiens
ccgaggaggccgggcuggggg

SEQ ID NO: 2395 - RNA, 21 nt, Homo sapiens
gccgaggaggccgggcugggg

SEQ ID NO: 2396 - RNA, 21 nt, Homo sapiens
ggccgaggaggccgggcuggg

SEQ ID NO: 2397 - RNA, 21 nt, Homo sapiens
aggccgaggaggccgggcugg

SEQ ID NO: 2398 - RNA, 21 nt, Homo sapiens
gaggccgaggaggccgggcug

SEQ ID NO: 2399 - RNA, 21 nt, Homo sapiens
ggaggccgaggaggccgggcu

SEQ ID NO: 2400 - RNA, 21 nt, Homo sapiens
uggaggccgaggaggccgggc

SEQ ID NO: 2401 - RNA, 21 nt, Homo sapiens
auggaggccgaggaggccggg

SEQ ID NO: 2402 - RNA, 21 nt, Homo sapiens
uauggaggccgaggaggccgg

SEQ ID NO: 2403 - RNA, 21 nt, Homo sapiens
guauggaggccgaggaggccg

SEQ ID NO: 2404 - RNA, 21 nt, Homo sapiens
gguauggaggccgaggaggcc

SEQ ID NO: 2405 - RNA, 21 nt, Homo sapiens
ggguauggaggccgaggaggc

SEQ ID NO: 2406 - RNA, 21 nt, Homo sapiens
aggguauggaggccgaggagg

SEQ ID NO: 2407 - RNA, 21 nt, Homo sapiens
gaggguauggaggccgaggag

SEQ ID NO: 2408 - RNA, 21 nt, Homo sapiens
ggaggguauggaggccgagga

SEQ ID NO: 2409 - RNA, 21 nt, Homo sapiens
aggaggguauggaggccgagg

SEQ ID NO: 2410 - RNA, 21 nt, Homo sapiens
uaggaggguauggaggccgag

SEQ ID NO: 2411 - RNA, 21 nt, Homo sapiens
cuaggaggguauggaggccga

SEQ ID NO: 2412 - RNA, 21 nt, Homo sapiens
ucuaggaggguauggaggccg

SEQ ID NO: 2413 - RNA, 21 nt, Homo sapiens
uucuaggaggguauggaggcc

SEQ ID NO: 2414 - RNA, 21 nt, Homo sapiens
cuucuaggaggguauggaggc

SEQ ID NO: 2415 - RNA, 21 nt, Homo sapiens
ccuucuaggaggguauggagg

SEQ ID NO: 2416 - RNA, 21 nt, Homo sapiens
cccuucuaggaggguauggag

SEQ ID NO: 2417 - RNA, 21 nt, Homo sapiens
ucccuucuaggaggguaugga

SEQ ID NO: 2418 - RNA, 21 nt, Homo sapiens
aucccuucuaggaggguaugg

SEQ ID NO: 2419 - RNA, 21 nt, Homo sapiens
caucccuucuaggaggguaug

SEQ ID NO: 2420 - RNA, 21 nt, Homo sapiens
ccaucccuucuaggaggguau

SEQ ID NO: 2421 - RNA, 21 nt, Homo sapiens
accaucccuucuaggagggua

SEQ ID NO: 2422 - RNA, 21 nt, Homo sapiens
aaccaucccuucuaggagggu

SEQ ID NO: 2423 - RNA, 21 nt, Homo sapiens
gaaccaucccuucuaggaggg

SEQ ID NO: 2424 - RNA, 21 nt, Homo sapiens
agaaccaucccuucuaggagg

SEQ ID NO: 2425 - RNA, 21 nt, Homo sapiens
cagaaccaucccuucuaggag

SEQ ID NO: 2426 - RNA, 21 nt, Homo sapiens
gguuguagcgggcacugccac

SEQ ID NO: 2427 - RNA, 21 nt, Homo sapiens
ugguuguagcgggcacugcca

SEQ ID NO: 2428 - RNA, 21 nt, Homo sapiens
cugguuguagcgggcacugcc

SEQ ID NO: 2429 - RNA, 21 nt, Homo sapiens
ccugguuguagcgggcacugc

SEQ ID NO: 2430 - RNA, 21 nt, Homo sapiens
cccugguuguagcgggcacug

SEQ ID NO: 2431 - RNA, 21 nt, Homo sapiens
gcccugguuguagcgggcacu

SEQ ID NO: 2432 - RNA, 21 nt, Homo sapiens
ggcccugguuguagcgggcac

SEQ ID NO: 2433 - RNA, 21 nt, Homo sapiens
cggcccugguuguagcgggca

SEQ ID NO: 2434 - RNA, 21 nt, Homo sapiens
ccggcccugguuguagcgggc

SEQ ID NO: 2435 - RNA, 21 nt, Homo sapiens
uccggcccugguuguagcggg

SEQ ID NO: 2436 - RNA, 21 nt, Homo sapiens
cuccggcccugguuguagcgg

SEQ ID NO: 2437 - RNA, 21 nt, Homo sapiens
gcuccggcccugguuguagcg

SEQ ID NO: 2438 - RNA, 21 nt, Homo sapiens
ugcuccggcccugguuguagc

SEQ ID NO: 2439 - RNA, 21 nt, Homo sapiens
cugcuccggcccugguuguag

SEQ ID NO: 2440 - RNA, 21 nt, Homo sapiens
ccugcuccggcccugguugua

SEQ ID NO: 2441 - RNA, 21 nt, Homo sapiens
uccugcuccggcccugguugu

SEQ ID NO: 2442 - RNA, 21 nt, Homo sapiens
cuccugcuccggcccugguug

SEQ ID NO: 2443 - RNA, 21 nt, Homo sapiens
acuccugcuccggcccugguu

SEQ ID NO: 2444 - RNA, 21 nt, Homo sapiens
cacuccugcuccggcccuggu

SEQ ID NO: 2445 - RNA, 21 nt, Homo sapiens
ggaugguuugggugugaaaac

SEQ ID NO: 2446 - RNA, 21 nt, Homo sapiens
aggaugguuugggugugaaaa

SEQ ID NO: 2447 - RNA, 21 nt, Homo sapiens
gaggaugguuugggugugaaa

SEQ ID NO: 2448 - RNA, 21 nt, Homo sapiens
ugaggaugguuugggugugaa

SEQ ID NO: 2449 - RNA, 21 nt, Homo sapiens
augaggaugguuuggguguga

SEQ ID NO: 2450 - RNA, 21 nt, Homo sapiens
aaugaggaugguuugggugug

SEQ ID NO: 2451 - RNA, 21 nt, Homo sapiens
gaaugaggaugguuugggugu

SEQ ID NO: 2452 - RNA, 21 nt, Homo sapiens
agaaugaggaugguuugggug

SEQ ID NO: 2453 - RNA, 21 nt, Homo sapiens
gagaaugaggaugguuugggu

SEQ ID NO: 2454 - RNA, 21 nt, Homo sapiens
agagaaugaggaugguuuggg

SEQ ID NO: 2455 - RNA, 21 nt, Homo sapiens
gagagaaugaggaugguuugg

SEQ ID NO: 2456 - RNA, 21 nt, Homo sapiens
ggagagaaugaggaugguuug

SEQ ID NO: 2457 - RNA, 21 nt, Homo sapiens
gggagagaaugaggaugguuu

SEQ ID NO: 2458 - RNA, 21 nt, Homo sapiens
agggagagaaugaggaugguu

SEQ ID NO: 2459 - RNA, 21 nt, Homo sapiens
gagggagagaaugaggauggu

SEQ ID NO: 2460 - RNA, 21 nt, Homo sapiens
agagggagagaaugaggaugg

SEQ ID NO: 2461 - RNA, 21 nt, Homo sapiens
gagagggagagaaugaggaug

SEQ ID NO: 2462 - RNA, 21 nt, Homo sapiens
ugagagggagagaaugaggau

SEQ ID NO: 2463 - RNA, 21 nt, Homo sapiens
cugagagggagagaaugagga

SEQ ID NO: 2464 - RNA, 21 nt, Homo sapiens
gcugagagggagagaaugagg

SEQ ID NO: 2465 - RNA, 21 nt, Homo sapiens
ggcugagagggagagaaugag

SEQ ID NO: 2466 - RNA, 21 nt, Homo sapiens
gggcugagagggagagaauga

SEQ ID NO: 2467 - RNA, 21 nt, Homo sapiens
agggcugagagggagagaaug

SEQ ID NO: 2468 - RNA, 21 nt, Homo sapiens
ucgagguccaagcagggccag

SEQ ID NO: 2469 - RNA, 21 nt, Homo sapiens
aucgagguccaagcagggcca

SEQ ID NO: 2470 - RNA, 21 nt, Homo sapiens
uaucgagguccaagcagggcc

SEQ ID NO: 2471 - RNA, 21 nt, Homo sapiens
uuaucgagguccaagcagggc

SEQ ID NO: 2472 - RNA, 21 nt, Homo sapiens
guuaucgagguccaagcaggg

SEQ ID NO: 2473 - RNA, 21 nt, Homo sapiens
cguuaucgagguccaagcagg

SEQ ID NO: 2474 - RNA, 21 nt, Homo sapiens
uucugaugcuagggcaccccu

SEQ ID NO: 2475 - RNA, 21 nt, Homo sapiens
cuucugaugcuagggcacccc

SEQ ID NO: 2476 - RNA, 21 nt, Homo sapiens
ccuucugaugcuagggcaccc

SEQ ID NO: 2477 - RNA, 21 nt, Homo sapiens
cccuucugaugcuagggcacc

SEQ ID NO: 2478 - RNA, 21 nt, Homo sapiens
acccuucugaugcuagggcac

SEQ ID NO: 2479 - RNA, 21 nt, Homo sapiens
aacccuucugaugcuagggca

SEQ ID NO: 2480 - RNA, 21 nt, Homo sapiens
gaacccuucugaugcuagggc

SEQ ID NO: 2481 - RNA, 21 nt, Homo sapiens
ugaacccuucugaugcuaggg

SEQ ID NO: 2482 - RNA, 21 nt, Homo sapiens
augaacccuucugaugcuagg

SEQ ID NO: 2483 - RNA, 21 nt, Homo sapiens
ucuacccucucugcagccccc

SEQ ID NO: 2484 - RNA, 21 nt, Homo sapiens
cucuacccucucugcagcccc

SEQ ID NO: 2485 - RNA, 21 nt, Homo sapiens
ucucuacccucucugcagccc

SEQ ID NO: 2486 - RNA, 21 nt, Homo sapiens
uucucuacccucucugcagcc

SEQ ID NO: 2487 - RNA, 21 nt, Homo sapiens
cuucucuacccucucugcagc

SEQ ID NO: 2488 - RNA, 21 nt, Homo sapiens
ccuucucuacccucucugcag

SEQ ID NO: 2489 - RNA, 21 nt, Homo sapiens
cccuucucuacccucucugca

SEQ ID NO: 2490 - RNA, 21 nt, Homo sapiens
ucccuucucuacccucucugc

SEQ ID NO: 2491 - RNA, 21 nt, Homo sapiens
gucccuucucuacccucucug

SEQ ID NO: 2492 - RNA, 21 nt, Homo sapiens
agucccuucucuacccucucu

SEQ ID NO: 2493 - RNA, 21 nt, Homo sapiens
aagucccuucucuacccucuc

SEQ ID NO: 2494 - RNA, 21 nt, Homo sapiens
aaagucccuucucuacccucu

SEQ ID NO: 2495 - RNA, 21 nt, Homo sapiens
caaagucccuucucuacccuc

SEQ ID NO: 2496 - RNA, 21 nt, Homo sapiens
gcaaagucccuucucuacccu

SEQ ID NO: 2497 - RNA, 21 nt, Homo sapiens
ugcaaagucccuucucuaccc

SEQ ID NO: 2498 - RNA, 21 nt, Homo sapiens
cugcaaagucccuucucuacc

SEQ ID NO: 2499 - RNA, 21 nt, Homo sapiens
ccugcaaagucccuucucuac

SEQ ID NO: 2500 - RNA, 21 nt, Homo sapiens
accugcaaagucccuucucua

SEQ ID NO: 2501 - RNA, 21 nt, Homo sapiens
caccugcaaagucccuucucu

SEQ ID NO: 2502 - RNA, 21 nt, Homo sapiens
ucaccugcaaagucccuucuc

SEQ ID NO: 2503 - RNA, 21 nt, Homo sapiens
uucaccugcaaagucccuucu

SEQ ID NO: 2504 - RNA, 21 nt, Homo sapiens
auucaccugcaaagucccuuc

SEQ ID NO: 2505 - RNA, 21 nt, Homo sapiens
ccacccaccucugaugaaaau

SEQ ID NO: 2506 - RNA, 21 nt, Homo sapiens
cccacccaccucugaugaaaa

SEQ ID NO: 2507 - RNA, 21 nt, Homo sapiens
acccacccaccucugaugaaa

SEQ ID NO: 2508 - RNA, 21 nt, Homo sapiens
cacccacccaccucugaugaa

SEQ ID NO: 2509 - RNA, 21 nt, Homo sapiens
acacccacccaccucugauga

SEQ ID NO: 2510 - RNA, 21 nt, Homo sapiens
aacacccacccaccucugaug

SEQ ID NO: 2511 - RNA, 21 nt, Homo sapiens
gaacacccacccaccucugau

SEQ ID NO: 2512 - RNA, 21 nt, Homo sapiens
ugaacacccacccaccucuga

SEQ ID NO: 2513 - RNA, 21 nt, Homo sapiens
gugaacacccacccaccucug

SEQ ID NO: 2514 - RNA, 21 nt, Homo sapiens
ugugaacacccacccaccucu

SEQ ID NO: 2515 - RNA, 21 nt, Homo sapiens
uugugaacacccacccaccuc

SEQ ID NO: 2516 - RNA, 21 nt, Homo sapiens
auugugaacacccacccaccu

SEQ ID NO: 2517 - RNA, 21 nt, Homo sapiens
uauugugaacacccacccacc

SEQ ID NO: 2518 - RNA, 21 nt, Homo sapiens
auauugugaacacccacccac

SEQ ID NO: 2519 - RNA, 21 nt, Homo sapiens
aauauugugaacacccaccca

SEQ ID NO: 2520 - RNA, 21 nt, Homo sapiens
aaauauugugaacacccaccc

SEQ ID NO: 2521 - RNA, 21 nt, Homo sapiens
uaaauauugugaacacccacc

SEQ ID NO: 2522 - RNA, 21 nt, Homo sapiens
auaaauauugugaacacccac

SEQ ID NO: 2523 - RNA, 21 nt, Homo sapiens
cucccauuaccaaaugaaaaa

SEQ ID NO: 2524 - RNA, 21 nt, Homo sapiens
cccuccuaaauaaauaccccc

SEQ ID NO: 2525 - RNA, 21 nt, Homo sapiens
ucccuccuaaauaaauacccc

SEQ ID NO: 2526 - RNA, 21 nt, Homo sapiens
cucccuccuaaauaaauaccc

SEQ ID NO: 2527 - RNA, 21 nt, Homo sapiens
acucccuccuaaauaaauacc

SEQ ID NO: 2528 - RNA, 21 nt, Homo sapiens
cacucccuccuaaauaaauac

SEQ ID NO: 2529 - RNA, 21 nt, Homo sapiens
acacucccuccuaaauaaaua

SEQ ID NO: 2530 - RNA, 21 nt, Homo sapiens
cacacucccuccuaaauaaau

SEQ ID NO: 2531 - RNA, 21 nt, Homo sapiens
ccacacucccuccuaaauaaa

SEQ ID NO: 2532 - RNA, 21 nt, Homo sapiens
accacacucccuccuaaauaa

SEQ ID NO: 2533 - RNA, 21 nt, Homo sapiens
aaccacacucccuccuaaaua

SEQ ID NO: 2534 - RNA, 21 nt, Homo sapiens
aaaccacacucccuccuaaau

SEQ ID NO: 2535 - RNA, 21 nt, Homo sapiens
gaaaccacacucccuccuaaa

SEQ ID NO: 2536 - RNA, 21 nt, Homo sapiens
ggaaaccacacucccuccuaa

SEQ ID NO: 2537 - RNA, 21 nt, Homo sapiens
aggaaaccacacucccuccua

SEQ ID NO: 2538 - RNA, 21 nt, Homo sapiens
aaggaaaccacacucccuccu

SEQ ID NO: 2539 - RNA, 21 nt, Homo sapiens
uaaggaaaccacacucccucc

SEQ ID NO: 2540 - RNA, 21 nt, Homo sapiens
cuaaggaaaccacacucccuc

SEQ ID NO: 2541 - RNA, 21 nt, Homo sapiens
ucuaaggaaaccacacucccu

SEQ ID NO: 2542 - RNA, 21 nt, Homo sapiens
uucuaaggaaaccacacuccc

SEQ ID NO: 2543 - RNA, 21 nt, Homo sapiens
cuucuaaggaaaccacacucc

SEQ ID NO: 2544 - RNA, 21 nt, Homo sapiens
ccuucuaaggaaaccacacuc

SEQ ID NO: 2545 - RNA, 21 nt, Homo sapiens
accuucuaaggaaaccacacu

SEQ ID NO: 2546 - RNA, 21 nt, Homo sapiens
uaccuucuaaggaaaccacac

SEQ ID NO: 2547 - RNA, 21 nt, Homo sapiens
auaccuucuaaggaaaccaca

SEQ ID NO: 2548 - RNA, 21 nt, Homo sapiens
uauaccuucuaaggaaaccac

SEQ ID NO: 2549 - RNA, 21 nt, Homo sapiens
cuauaccuucuaaggaaacca

SEQ ID NO: 2550 - RNA, 21 nt, Homo sapiens
acuauaccuucuaaggaaacc

SEQ ID NO: 2551 - RNA, 21 nt, Homo sapiens
gacuauaccuucuaaggaaac

SEQ ID NO: 2552 - RNA, 21 nt, Homo sapiens
agacuauaccuucuaaggaaa

SEQ ID NO: 2553 - RNA, 21 nt, Homo sapiens
gagacuauaccuucuaaggaa

SEQ ID NO: 2554 - RNA, 21 nt, Homo sapiens
agagacuauaccuucuaagga

SEQ ID NO: 2555 - RNA, 21 nt, Homo sapiens
uagagacuauaccuucuaagg

SEQ ID NO: 2556 - RNA, 21 nt, Homo sapiens
cuagagacuauaccuucuaag

SEQ ID NO: 2557 - RNA, 21 nt, Homo sapiens
gcuagagacuauaccuucuaa

SEQ ID NO: 2558 - RNA, 21 nt, Homo sapiens
ggcuagagacuauaccuucua

SEQ ID NO: 2559 - RNA, 21 nt, Homo sapiens
gggcuagagacuauaccuucu

SEQ ID NO: 2560 - RNA, 21 nt, Homo sapiens
agggcuagagacuauaccuuc

SEQ ID NO: 2561 - RNA, 21 nt, Homo sapiens
gagggcuagagacuauaccuu

SEQ ID NO: 2562 - RNA, 21 nt, Homo sapiens
agagggcuagagacuauaccu

SEQ ID NO: 2563 - RNA, 21 nt, Homo sapiens
uagagggcuagagacuauacc

SEQ ID NO: 2564 - RNA, 21 nt, Homo sapiens
uuagagggcuagagacuauac

SEQ ID NO: 2565 - RNA, 21 nt, Homo sapiens
cuuagagggcuagagacuaua

SEQ ID NO: 2566 - RNA, 21 nt, Homo sapiens
ccuuagagggcuagagacuau

SEQ ID NO: 2567 - RNA, 21 nt, Homo sapiens
gccuuagagggcuagagacua

SEQ ID NO: 2568 - RNA, 21 nt, Homo sapiens
agccuuagagggcuagagacu

SEQ ID NO: 2569 - RNA, 21 nt, Homo sapiens
cagccuuagagggcuagagac

SEQ ID NO: 2570 - RNA, 21 nt, Homo sapiens
aacucuaaacuccucauuuuc

SEQ ID NO: 2571 - RNA, 21 nt, Homo sapiens
caacucuaaacuccucauuuu

SEQ ID NO: 2572 - RNA, 21 nt, Homo sapiens
gcaacucuaaacuccucauuu

SEQ ID NO: 2573 - RNA, 21 nt, Homo sapiens
ugcaacucuaaacuccucauu

SEQ ID NO: 2574 - RNA, 21 nt, Homo sapiens
cugcaacucuaaacuccucau

SEQ ID NO: 2575 - RNA, 21 nt, Homo sapiens
gcugcaacucuaaacuccuca

SEQ ID NO: 2576 - RNA, 21 nt, Homo sapiens
agcugcaacucuaaacuccuc

SEQ ID NO: 2577 - RNA, 21 nt, Homo sapiens
cagcugcaacucuaaacuccu

SEQ ID NO: 2578 - RNA, 21 nt, Homo sapiens
uccaacuuccuucaaaccccu

SEQ ID NO: 2579 - RNA, 21 nt, Homo sapiens
uuccaacuuccuucaaacccc

SEQ ID NO: 2580 - RNA, 21 nt, Homo sapiens
cuuccaacuuccuucaaaccc

SEQ ID NO: 2581 - RNA, 21 nt, Homo sapiens
acuuccaacuuccuucaaacc

SEQ ID NO: 2582 - RNA, 21 nt, Homo sapiens
cacuuccaacuuccuucaaac

SEQ ID NO: 2583 - RNA, 21 nt, Homo sapiens
uuucugagaccagaugccccc

SEQ ID NO: 2584 - RNA, 21 nt, Homo sapiens
auuucugagaccagaugcccc

SEQ ID NO: 2585 - RNA, 21 nt, Homo sapiens
cauuucugagaccagaugccc

SEQ ID NO: 2586 - RNA, 21 nt, Homo sapiens
ccauuucugagaccagaugcc

SEQ ID NO: 2587 - RNA, 21 nt, Homo sapiens
uccauuucugagaccagaugc

SEQ ID NO: 2588 - RNA, 21 nt, Homo sapiens
guccauuucugagaccagaug

SEQ ID NO: 2589 - RNA, 21 nt, Homo sapiens
gguccauuucugagaccagau

SEQ ID NO: 2590 - RNA, 21 nt, Homo sapiens
ugguccauuucugagaccaga

SEQ ID NO: 2591 - RNA, 21 nt, Homo sapiens
cugguccauuucugagaccag

SEQ ID NO: 2592 - RNA, 21 nt, Homo sapiens
gcugguccauuucugagacca

SEQ ID NO: 2593 - RNA, 21 nt, Homo sapiens
agcugguccauuucugagacc

SEQ ID NO: 2594 - RNA, 21 nt, Homo sapiens
cagcugguccauuucugagac

SEQ ID NO: 2595 - RNA, 21 nt, Homo sapiens
ccagcugguccauuucugaga

SEQ ID NO: 2596 - RNA, 21 nt, Homo sapiens
uccagcugguccauuucugag

SEQ ID NO: 2597 - RNA, 21 nt, Homo sapiens
auccagcugguccauuucuga

SEQ ID NO: 2598 - RNA, 21 nt, Homo sapiens
cauccagcugguccauuucug

SEQ ID NO: 2599 - RNA, 21 nt, Homo sapiens
gcauccagcugguccauuucu

SEQ ID NO: 2600 - RNA, 21 nt, Homo sapiens
ugcauccagcugguccauuuc

SEQ ID NO: 2601 - RNA, 21 nt, Homo sapiens
cugcauccagcugguccauuu

SEQ ID NO: 2602 - RNA, 21 nt, Homo sapiens
ccugcauccagcugguccauu

SEQ ID NO: 2603 - RNA, 21 nt, Homo sapiens
cccugcauccagcugguccau

SEQ ID NO: 2604 - RNA, 21 nt, Homo sapiens
gcccugcauccagcuggucca

SEQ ID NO: 2605 - RNA, 21 nt, Homo sapiens
ugcccugcauccagcuggucc

SEQ ID NO: 2606 - RNA, 21 nt, Homo sapiens
cugcccugcauccagcugguc

SEQ ID NO: 2607 - RNA, 21 nt, Homo sapiens
cucaagcacccucaguccccu

SEQ ID NO: 2608 - RNA, 21 nt, Homo sapiens
acucaagcacccucagucccc

SEQ ID NO: 2609 - RNA, 21 nt, Homo sapiens
uacucaagcacccucaguccc

SEQ ID NO: 2610 - RNA, 21 nt, Homo sapiens
cuacucaagcacccucagucc

SEQ ID NO: 2611 - RNA, 21 nt, Homo sapiens
ccuacucaagcacccucaguc

SEQ ID NO: 2612 - RNA, 21 nt, Homo sapiens
uccuacucaagcacccucagu

SEQ ID NO: 2613 - RNA, 21 nt, Homo sapiens
auccuacucaagcacccucag

SEQ ID NO: 2614 - RNA, 21 nt, Homo sapiens
cauccuacucaagcacccuca

SEQ ID NO: 2615 - RNA, 21 nt, Homo sapiens
acauccuacucaagcacccuc

SEQ ID NO: 2616 - RNA, 21 nt, Homo sapiens
cacauccuacucaagcacccu

SEQ ID NO: 2617 - RNA, 21 nt, Homo sapiens
ucacauccuacucaagcaccc

SEQ ID NO: 2618 - RNA, 21 nt, Homo sapiens
cucacauccuacucaagcacc

SEQ ID NO: 2619 - RNA, 21 nt, Homo sapiens
ucucacauccuacucaagcac

SEQ ID NO: 2620 - RNA, 21 nt, Homo sapiens
gucucacauccuacucaagca

SEQ ID NO: 2621 - RNA, 21 nt, Homo sapiens
agucucacauccuacucaagc

SEQ ID NO: 2622 - RNA, 21 nt, Homo sapiens
aagucucacauccuacucaag

SEQ ID NO: 2623 - RNA, 21 nt, Homo sapiens
gaagucucacauccuacucaa

SEQ ID NO: 2624 - RNA, 21 nt, Homo sapiens
ugaagucucacauccuacuca

SEQ ID NO: 2625 - RNA, 21 nt, Homo sapiens
augaagucucacauccuacuc

SEQ ID NO: 2626 - RNA, 21 nt, Homo sapiens
caugaagucucacauccuacu

SEQ ID NO: 2627 - RNA, 21 nt, Homo sapiens
ccaugaagucucacauccuac

SEQ ID NO: 2628 - RNA, 21 nt, Homo sapiens
cccaugaagucucacauccua

SEQ ID NO: 2629 - RNA, 21 nt, Homo sapiens
gcccaugaagucucacauccu

SEQ ID NO: 2630 - RNA, 21 nt, Homo sapiens
ggcccaugaagucucacaucc

SEQ ID NO: 2631 - RNA, 21 nt, Homo sapiens
aggcccaugaagucucacauc

SEQ ID NO: 2632 - RNA, 21 nt, Homo sapiens
caggcccaugaagucucacau

SEQ ID NO: 2633 - RNA, 21 nt, Homo sapiens
ccaggcccaugaagucucaca

SEQ ID NO: 2634 - RNA, 21 nt, Homo sapiens
cccaggcccaugaagucucac

SEQ ID NO: 2635 - RNA, 21 nt, Homo sapiens
acccaggcccaugaagucuca

SEQ ID NO: 2636 - RNA, 21 nt, Homo sapiens
aacccaggcccaugaagucuc

SEQ ID NO: 2637 - RNA, 21 nt, Homo sapiens
gaacccaggcccaugaagucu

SEQ ID NO: 2638 - RNA, 21 nt, Homo sapiens
agaacccaggcccaugaaguc

SEQ ID NO: 2639 - RNA, 21 nt, Homo sapiens
cagaacccaggcccaugaagu

SEQ ID NO: 2640 - RNA, 21 nt, Homo sapiens
acagaacccaggcccaugaag

SEQ ID NO: 2641 - RNA, 21 nt, Homo sapiens
aacagaacccaggcccaugaa

SEQ ID NO: 2642 - RNA, 21 nt, Homo sapiens
caacagaacccaggcccauga

SEQ ID NO: 2643 - RNA, 21 nt, Homo sapiens
ucaacagaacccaggcccaug

SEQ ID NO: 2644 - RNA, 21 nt, Homo sapiens
cucaacagaacccaggcccau

SEQ ID NO: 2645 - RNA, 21 nt, Homo sapiens
acucaacagaacccaggccca

SEQ ID NO: 2646 - RNA, 21 nt, Homo sapiens
uaagaaauugauacugaaaaa

SEQ ID NO: 2647 - RNA, 21 nt, Homo sapiens
uuaagaaauugauacugaaaa

SEQ ID NO: 2648 - RNA, 21 nt, Homo sapiens
uuuaagaaauugauacugaaa

SEQ ID NO: 2649 - RNA, 21 nt, Homo sapiens
guuuaagaaauugauacugaa

SEQ ID NO: 2650 - RNA, 21 nt, Homo sapiens
gguuuaagaaauugauacuga

SEQ ID NO: 2651 - RNA, 21 nt, Homo sapiens
ugguuuaagaaauugauacug

SEQ ID NO: 2652 - RNA, 21 nt, Homo sapiens
uugguuuaagaaauugauacu

SEQ ID NO: 2653 - RNA, 21 nt, Homo sapiens
uuugguuuaagaaauugauac

SEQ ID NO: 2654 - RNA, 21 nt, Homo sapiens
auuugguuuaagaaauugaua

SEQ ID NO: 2655 - RNA, 21 nt, Homo sapiens
ggucacgagaugagcaccccc

SEQ ID NO: 2656 - RNA, 21 nt, Homo sapiens
aggucacgagaugagcacccc

SEQ ID NO: 2657 - RNA, 21 nt, Homo sapiens
gaggucacgagaugagcaccc

SEQ ID NO: 2658 - RNA, 21 nt, Homo sapiens
agaggucacgagaugagcacc

SEQ ID NO: 2659 - RNA, 21 nt, Homo sapiens
cagaggucacgagaugagcac

SEQ ID NO: 2660 - RNA, 21 nt, Homo sapiens
gcagaggucacgagaugagca

SEQ ID NO: 2661 - RNA, 21 nt, Homo sapiens
ggcagaggucacgagaugagc

SEQ ID NO: 2662 - RNA, 21 nt, Homo sapiens
guuugugaaggaugugggugg

SEQ ID NO: 2663 - RNA, 21 nt, Homo sapiens
aguuugugaaggaugugggug

SEQ ID NO: 2664 - RNA, 21 nt, Homo sapiens
gaguuugugaaggaugugggu

SEQ ID NO: 2665 - RNA, 21 nt, Homo sapiens
ggaguuugugaaggauguggg

SEQ ID NO: 2666 - RNA, 21 nt, Homo sapiens
uggaguuugugaaggaugugg

SEQ ID NO: 2667 - RNA, 21 nt, Homo sapiens
auggaguuugugaaggaugug

SEQ ID NO: 2668 - RNA, 21 nt, Homo sapiens
cauggaguuugugaaggaugu

SEQ ID NO: 2669 - RNA, 21 nt, Homo sapiens
acauggaguuugugaaggaug

SEQ ID NO: 2670 - RNA, 21 nt, Homo sapiens
aacauggaguuugugaaggau

SEQ ID NO: 2671 - RNA, 21 nt, Homo sapiens
aaacauggaguuugugaagga

SEQ ID NO: 2672 - RNA, 21 nt, Homo sapiens
gaaacauggaguuugugaagg

SEQ ID NO: 2673 - RNA, 21 nt, Homo sapiens
ugaaacauggaguuugugaag

SEQ ID NO: 2674 - RNA, 21 nt, Homo sapiens
cugaaacauggaguuugugaa

SEQ ID NO: 2675 - RNA, 21 nt, Homo sapiens
acugaaacauggaguuuguga

SEQ ID NO: 2676 - RNA, 21 nt, Homo sapiens
cacugaaacauggaguuugug

SEQ ID NO: 2677 - RNA, 21 nt, Homo sapiens
acacugaaacauggaguuugu

SEQ ID NO: 2678 - RNA, 21 nt, Homo sapiens
aacacugaaacauggaguuug

SEQ ID NO: 2679 - RNA, 21 nt, Homo sapiens
aaacacugaaacauggaguuu

SEQ ID NO: 2680 - RNA, 21 nt, Homo sapiens
caaacacugaaacauggaguu

SEQ ID NO: 2681 - RNA, 21 nt, Homo sapiens
ucaaacacugaaacauggagu

SEQ ID NO: 2682 - RNA, 21 nt, Homo sapiens
cucaaacacugaaacauggag

SEQ ID NO: 2683 - RNA, 21 nt, Homo sapiens
acucaaacacugaaacaugga

SEQ ID NO: 2684 - RNA, 21 nt, Homo sapiens
gacucaaacacugaaacaugg

SEQ ID NO: 2685 - RNA, 21 nt, Homo sapiens
ggacucaaacacugaaacaug

SEQ ID NO: 2686 - RNA, 21 nt, Homo sapiens
uggacucaaacacugaaacau

SEQ ID NO: 2687 - RNA, 21 nt, Homo sapiens
auggacucaaacacugaaaca

SEQ ID NO: 2688 - RNA, 21 nt, Homo sapiens
cauggacucaaacacugaaac

SEQ ID NO: 2689 - RNA, 21 nt, Homo sapiens
acauggacucaaacacugaaa

SEQ ID NO: 2690 - RNA, 21 nt, Homo sapiens
aacauggacucaaacacugaa

SEQ ID NO: 2691 - RNA, 21 nt, Homo sapiens
aaacauggacucaaacacuga

SEQ ID NO: 2692 - RNA, 21 nt, Homo sapiens
uaaacauggacucaaacacug

SEQ ID NO: 2693 - RNA, 21 nt, Homo sapiens
auaaacauggacucaaacacu

SEQ ID NO: 2694 - RNA, 21 nt, Homo sapiens
aauaaacauggacucaaacac

SEQ ID NO: 2695 - RNA, 21 nt, Homo sapiens
gaauaaacauggacucaaaca

SEQ ID NO: 2696 - RNA, 21 nt, Homo sapiens
agaauaaacauggacucaaac

SEQ ID NO: 2697 - RNA, 21 nt, Homo sapiens
cagaauaaacauggacucaaa

SEQ ID NO: 2698 - RNA, 21 nt, Homo sapiens
gcagaauaaacauggacucaa

SEQ ID NO: 2699 - RNA, 21 nt, Homo sapiens
ugcagaauaaacauggacuca

SEQ ID NO: 2700 - RNA, 21 nt, Homo sapiens
uugcagaauaaacauggacuc

SEQ ID NO: 2701 - RNA, 21 nt, Homo sapiens
uuugcagaauaaacauggacu

SEQ ID NO: 2702 - RNA, 21 nt, Homo sapiens
auuugcagaauaaacauggac

SEQ ID NO: 2703 - RNA, 21 nt, Homo sapiens
uauuugcagaauaaacaugga

SEQ ID NO: 2704 - RNA, 21 nt, Homo sapiens
uuauuugcagaauaaacaugg

SEQ ID NO: 2705 - RNA, 21 nt, Homo sapiens
uuuauuugcagaauaaacaug

SEQ ID NO: 2706 - RNA, 21 nt, Homo sapiens
auuuauuugcagaauaaacau

SEQ ID NO: 2707 - RNA, 21 nt, Homo sapiens
cauuuauuugcagaauaaaca

SEQ ID NO: 2708 - RNA, 21 nt, Homo sapiens
ccauuuauuugcagaauaaac

SEQ ID NO: 2709 - RNA, 21 nt, Homo sapiens
accauuuauuugcagaauaaa

SEQ ID NO: 2710 - RNA, 21 nt, Homo sapiens
uaccauuuauuugcagaauaa

SEQ ID NO: 2711 - RNA, 21 nt, Homo sapiens
uuaccauuuauuugcagaaua

SEQ ID NO: 2712 - RNA, 21 nt, Homo sapiens
auuaccauuuauuugcagaau

SEQ ID NO: 2713 - RNA, 21 nt, Homo sapiens
cauuaccauuuauuugcagaa

SEQ ID NO: 2714 - RNA, 21 nt, Homo sapiens
acauuaccauuuauuugcaga

SEQ ID NO: 2715 - RNA, 21 nt, Homo sapiens
uacauuaccauuuauuugcag

SEQ ID NO: 2716 - RNA, 21 nt, Homo sapiens
auacauuaccauuuauuugca

SEQ ID NO: 2717 - RNA, 21 nt, Homo sapiens
aauacauuaccauuuauuugc

SEQ ID NO: 2718 - RNA, 21 nt, Homo sapiens
caauacauuaccauuuauuug

SEQ ID NO: 2719 - RNA, 21 nt, Homo sapiens
ccaauacauuaccauuuauuu

SEQ ID NO: 2720 - RNA, 21 nt, Homo sapiens
uccaauacauuaccauuuauu

SEQ ID NO: 2721 - RNA, 19 nt, Homo sapiens
gcucccauugucucggcag

SEQ ID NO: 2722 - RNA, 19 nt, Homo sapiens
cucccauugucucggcaga

SEQ ID NO: 2723 - RNA, 19 nt, Homo sapiens
ucccauugucucggcagau

SEQ ID NO: 2724 - RNA, 19 nt, Homo sapiens
cccauugucucggcagaug

SEQ ID NO: 2725 - RNA, 19 nt, Homo sapiens
ccauugucucggcagaugc

SEQ ID NO: 2726 - RNA, 19 nt, Homo sapiens
cauugucucggcagaugcc

SEQ ID NO: 2727 - RNA, 19 nt, Homo sapiens
auugucucggcagaugccg

SEQ ID NO: 2728 - RNA, 19 nt, Homo sapiens
uugucucggcagaugccgc

SEQ ID NO: 2729 - RNA, 19 nt, Homo sapiens
ugucucggcagaugccgcc

SEQ ID NO: 2730 - RNA, 19 nt, Homo sapiens
gucucggcagaugccgccu

SEQ ID NO: 2731 - RNA, 19 nt, Homo sapiens
ucucggcagaugccgccug

SEQ ID NO: 2732 - RNA, 19 nt, Homo sapiens
cucggcagaugccgccugg

SEQ ID NO: 2733 - RNA, 19 nt, Homo sapiens
ucggcagaugccgccuggu

SEQ ID NO: 2734 - RNA, 19 nt, Homo sapiens
cggcagaugccgccugguc

SEQ ID NO: 2735 - RNA, 19 nt, Homo sapiens
ggcagaugccgccuggucc

SEQ ID NO: 2736 - RNA, 19 nt, Homo sapiens
gcagaugccgccuggucca

SEQ ID NO: 2737 - RNA, 19 nt, Homo sapiens
cagaugccgccugguccag

SEQ ID NO: 2738 - RNA, 19 nt, Homo sapiens
agaugccgccugguccagc

SEQ ID NO: 2739 - RNA, 19 nt, Homo sapiens
gaugccgccugguccagcu

SEQ ID NO: 2740 - RNA, 19 nt, Homo sapiens
augccgccugguccagcua

SEQ ID NO: 2741 - RNA, 19 nt, Homo sapiens
ugccgccugguccagcuau

SEQ ID NO: 2742 - RNA, 19 nt, Homo sapiens
gccgccugguccagcuauc

SEQ ID NO: 2743 - RNA, 19 nt, Homo sapiens
ccgccugguccagcuaucg

SEQ ID NO: 2744 - RNA, 19 nt, Homo sapiens
cgccugguccagcuaucgu

SEQ ID NO: 2745 - RNA, 19 nt, Homo sapiens
gccugguccagcuaucgug

SEQ ID NO: 2746 - RNA, 19 nt, Homo sapiens
ccugguccagcuaucgugc

SEQ ID NO: 2747 - RNA, 19 nt, Homo sapiens
cugguccagcuaucgugcu

SEQ ID NO: 2748 - RNA, 19 nt, Homo sapiens
ugguccagcuaucgugcuc

SEQ ID NO: 2749 - RNA, 19 nt, Homo sapiens
gguccagcuaucgugcucg

SEQ ID NO: 2750 - RNA, 19 nt, Homo sapiens
guccagcuaucgugcucgg

SEQ ID NO: 2751 - RNA, 19 nt, Homo sapiens
uccagcuaucgugcucggu

SEQ ID NO: 2752 - RNA, 19 nt, Homo sapiens
ccagcuaucgugcucggua

SEQ ID NO: 2753 - RNA, 19 nt, Homo sapiens
cagcuaucgugcucgguau

SEQ ID NO: 2754 - RNA, 19 nt, Homo sapiens
agcuaucgugcucgguauu

SEQ ID NO: 2755 - RNA, 19 nt, Homo sapiens
gcuaucgugcucgguauuc

SEQ ID NO: 2756 - RNA, 19 nt, Homo sapiens
cuaucgugcucgguauuca

SEQ ID NO: 2757 - RNA, 19 nt, Homo sapiens
uaucgugcucgguauucag

SEQ ID NO: 2758 - RNA, 19 nt, Homo sapiens
aucgugcucgguauucagu

SEQ ID NO: 2759 - RNA, 19 nt, Homo sapiens
ucgugcucgguauucaguu

SEQ ID NO: 2760 - RNA, 19 nt, Homo sapiens
cgugcucgguauucaguuu

SEQ ID NO: 2761 - RNA, 19 nt, Homo sapiens
uuuccggagcagcgcucuu

SEQ ID NO: 2762 - RNA, 19 nt, Homo sapiens
uuccggagcagcgcucuuu

SEQ ID NO: 2763 - RNA, 19 nt, Homo sapiens
uccggagcagcgcucuuuc

SEQ ID NO: 2764 - RNA, 19 nt, Homo sapiens
ccggagcagcgcucuuucu

SEQ ID NO: 2765 - RNA, 19 nt, Homo sapiens
cggagcagcgcucuuucuc

SEQ ID NO: 2766 - RNA, 19 nt, Homo sapiens
ggagcagcgcucuuucucu

SEQ ID NO: 2767 - RNA, 19 nt, Homo sapiens
gagcagcgcucuuucucug

SEQ ID NO: 2768 - RNA, 19 nt, Homo sapiens
agcagcgcucuuucucugg

SEQ ID NO: 2769 - RNA, 19 nt, Homo sapiens
ggcccgcggagcggucccg

SEQ ID NO: 2770 - RNA, 19 nt, Homo sapiens
gcccgcggagcggucccgc

SEQ ID NO: 2771 - RNA, 19 nt, Homo sapiens
cccgcggagcggucccgcg

SEQ ID NO: 2772 - RNA, 19 nt, Homo sapiens
ccgcggagcggucccgcgg

SEQ ID NO: 2773 - RNA, 19 nt, Homo sapiens
cgcggagcggucccgcggc

SEQ ID NO: 2774 - RNA, 19 nt, Homo sapiens
gcggagcggucccgcggcc

SEQ ID NO: 2775 - RNA, 19 nt, Homo sapiens
cggagcggucccgcggccg

SEQ ID NO: 2776 - RNA, 19 nt, Homo sapiens
ggagcggucccgcggccga

SEQ ID NO: 2777 - RNA, 19 nt, Homo sapiens
gagcggucccgcggccgag

SEQ ID NO: 2778 - RNA, 19 nt, Homo sapiens
agcggucccgcggccgagu

SEQ ID NO: 2779 - RNA, 19 nt, Homo sapiens
gcggucccgcggccgagua

SEQ ID NO: 2780 - RNA, 19 nt, Homo sapiens
cggucccgcggccgaguac

SEQ ID NO: 2781 - RNA, 19 nt, Homo sapiens
ggucccgcggccgaguacc

SEQ ID NO: 2782 - RNA, 19 nt, Homo sapiens
gucccgcggccgaguaccg

SEQ ID NO: 2783 - RNA, 19 nt, Homo sapiens
ucccgcggccgaguaccgg

SEQ ID NO: 2784 - RNA, 19 nt, Homo sapiens
cccgcggccgaguaccgga

SEQ ID NO: 2785 - RNA, 19 nt, Homo sapiens
ccgcggccgaguaccggau

SEQ ID NO: 2786 - RNA, 19 nt, Homo sapiens
cgcggccgaguaccggauu

SEQ ID NO: 2787 - RNA, 19 nt, Homo sapiens
gcggccgaguaccggauuc

SEQ ID NO: 2788 - RNA, 19 nt, Homo sapiens
cggccgaguaccggauucc

SEQ ID NO: 2789 - RNA, 19 nt, Homo sapiens
ggccgaguaccggauuccc

SEQ ID NO: 2790 - RNA, 19 nt, Homo sapiens
gccgaguaccggauucccg

SEQ ID NO: 2791 - RNA, 19 nt, Homo sapiens
ccgaguaccggauucccga

SEQ ID NO: 2792 - RNA, 19 nt, Homo sapiens
cgaguaccggauucccgag

SEQ ID NO: 2793 - RNA, 19 nt, Homo sapiens
gaguaccggauucccgagu

SEQ ID NO: 2794 - RNA, 19 nt, Homo sapiens
aguaccggauucccgaguu

SEQ ID NO: 2795 - RNA, 19 nt, Homo sapiens
guaccggauucccgaguuu

SEQ ID NO: 2796 - RNA, 19 nt, Homo sapiens
uaccggauucccgaguuug

SEQ ID NO: 2797 - RNA, 19 nt, Homo sapiens
accggauucccgaguuugg

SEQ ID NO: 2798 - RNA, 19 nt, Homo sapiens
ccggauucccgaguuuggg

SEQ ID NO: 2799 - RNA, 19 nt, Homo sapiens
cggauucccgaguuuggga

SEQ ID NO: 2800 - RNA, 19 nt, Homo sapiens
ggauucccgaguuugggag

SEQ ID NO: 2801 - RNA, 19 nt, Homo sapiens
gauucccgaguuugggagg

SEQ ID NO: 2802 - RNA, 19 nt, Homo sapiens
auucccgaguuugggaggc

SEQ ID NO: 2803 - RNA, 19 nt, Homo sapiens
uucccgaguuugggaggcu

SEQ ID NO: 2804 - RNA, 19 nt, Homo sapiens
ucccgaguuugggaggcuc

SEQ ID NO: 2805 - RNA, 19 nt, Homo sapiens
cccgaguuugggaggcucu

SEQ ID NO: 2806 - RNA, 19 nt, Homo sapiens
ccgaguuugggaggcucug

SEQ ID NO: 2807 - RNA, 19 nt, Homo sapiens
cgaguuugggaggcucugc

SEQ ID NO: 2808 - RNA, 19 nt, Homo sapiens
gaguuugggaggcucugcu

SEQ ID NO: 2809 - RNA, 19 nt, Homo sapiens
aguuugggaggcucugcuu

SEQ ID NO: 2810 - RNA, 19 nt, Homo sapiens
guuugggaggcucugcuuu

SEQ ID NO: 2811 - RNA, 19 nt, Homo sapiens
uuugggaggcucugcuuuc

SEQ ID NO: 2812 - RNA, 19 nt, Homo sapiens
uugggaggcucugcuuucc

SEQ ID NO: 2813 - RNA, 19 nt, Homo sapiens
ugggaggcucugcuuuccu

SEQ ID NO: 2814 - RNA, 19 nt, Homo sapiens
gggaggcucugcuuuccuc

SEQ ID NO: 2815 - RNA, 19 nt, Homo sapiens
ggaggcucugcuuuccucc

SEQ ID NO: 2816 - RNA, 19 nt, Homo sapiens
gaggcucugcuuuccuccu

SEQ ID NO: 2817 - RNA, 19 nt, Homo sapiens
aggcucugcuuuccuccuu

SEQ ID NO: 2818 - RNA, 19 nt, Homo sapiens
ggcucugcuuuccuccuua

SEQ ID NO: 2819 - RNA, 19 nt, Homo sapiens
gcucugcuuuccuccuuag

SEQ ID NO: 2820 - RNA, 19 nt, Homo sapiens
cucugcuuuccuccuuagg

SEQ ID NO: 2821 - RNA, 19 nt, Homo sapiens
ucugcuuuccuccuuagga

SEQ ID NO: 2822 - RNA, 19 nt, Homo sapiens
cugcuuuccuccuuaggac

SEQ ID NO: 2823 - RNA, 19 nt, Homo sapiens
ugcuuuccuccuuaggacc

SEQ ID NO: 2824 - RNA, 19 nt, Homo sapiens
gcuuuccuccuuaggaccc

SEQ ID NO: 2825 - RNA, 19 nt, Homo sapiens
cuuuccuccuuaggaccca

SEQ ID NO: 2826 - RNA, 19 nt, Homo sapiens
uuuccuccuuaggacccac

SEQ ID NO: 2827 - RNA, 19 nt, Homo sapiens
uuccuccuuaggacccacu

SEQ ID NO: 2828 - RNA, 19 nt, Homo sapiens
uccuccuuaggacccacuu

SEQ ID NO: 2829 - RNA, 19 nt, Homo sapiens
ccuccuuaggacccacuuu

SEQ ID NO: 2830 - RNA, 19 nt, Homo sapiens
cuccuuaggacccacuuug

SEQ ID NO: 2831 - RNA, 19 nt, Homo sapiens
uccuuaggacccacuuugc

SEQ ID NO: 2832 - RNA, 19 nt, Homo sapiens
ccuuaggacccacuuugcc

SEQ ID NO: 2833 - RNA, 19 nt, Homo sapiens
cuuaggacccacuuugccg

SEQ ID NO: 2834 - RNA, 19 nt, Homo sapiens
uuaggacccacuuugccgu

SEQ ID NO: 2835 - RNA, 19 nt, Homo sapiens
uaggacccacuuugccguc

SEQ ID NO: 2836 - RNA, 19 nt, Homo sapiens
aggacccacuuugccgucc

SEQ ID NO: 2837 - RNA, 19 nt, Homo sapiens
ggacccacuuugccguccu

SEQ ID NO: 2838 - RNA, 19 nt, Homo sapiens
gacccacuuugccguccug

SEQ ID NO: 2839 - RNA, 19 nt, Homo sapiens
acccacuuugccguccugg

SEQ ID NO: 2840 - RNA, 19 nt, Homo sapiens
cccacuuugccguccuggg

SEQ ID NO: 2841 - RNA, 19 nt, Homo sapiens
ggcugcaguuauguccgcg

SEQ ID NO: 2842 - RNA, 19 nt, Homo sapiens
gcugcaguuauguccgcgc

SEQ ID NO: 2843 - RNA, 19 nt, Homo sapiens
cugcaguuauguccgcgcu

SEQ ID NO: 2844 - RNA, 19 nt, Homo sapiens
ugcaguuauguccgcgcug

SEQ ID NO: 2845 - RNA, 19 nt, Homo sapiens
gcaguuauguccgcgcugc

SEQ ID NO: 2846 - RNA, 19 nt, Homo sapiens
caguuauguccgcgcugcg

SEQ ID NO: 2847 - RNA, 19 nt, Homo sapiens
aguuauguccgcgcugcga

SEQ ID NO: 2848 - RNA, 19 nt, Homo sapiens
guuauguccgcgcugcgac

SEQ ID NO: 2849 - RNA, 19 nt, Homo sapiens
uuauguccgcgcugcgacc

SEQ ID NO: 2850 - RNA, 19 nt, Homo sapiens
uauguccgcgcugcgaccu

SEQ ID NO: 2851 - RNA, 19 nt, Homo sapiens
auguccgcgcugcgaccuc

SEQ ID NO: 2852 - RNA, 19 nt, Homo sapiens
uguccgcgcugcgaccucu

SEQ ID NO: 2853 - RNA, 19 nt, Homo sapiens
guccgcgcugcgaccucuc

SEQ ID NO: 2854 - RNA, 19 nt, Homo sapiens
uccgcgcugcgaccucucc

SEQ ID NO: 2855 - RNA, 19 nt, Homo sapiens
ccgcgcugcgaccucuccu

SEQ ID NO: 2856 - RNA, 19 nt, Homo sapiens
cgcgcugcgaccucuccug

SEQ ID NO: 2857 - RNA, 19 nt, Homo sapiens
gcgcugcgaccucuccugc

SEQ ID NO: 2858 - RNA, 19 nt, Homo sapiens
cgcugcgaccucuccugcu

SEQ ID NO: 2859 - RNA, 19 nt, Homo sapiens
gcugcgaccucuccugcuu

SEQ ID NO: 2860 - RNA, 19 nt, Homo sapiens
cugcgaccucuccugcuuc

SEQ ID NO: 2861 - RNA, 19 nt, Homo sapiens
ugcgaccucuccugcuucu

SEQ ID NO: 2862 - RNA, 19 nt, Homo sapiens
gcgaccucuccugcuucug

SEQ ID NO: 2863 - RNA, 19 nt, Homo sapiens
cgaccucuccugcuucugc

SEQ ID NO: 2864 - RNA, 19 nt, Homo sapiens
gaccucuccugcuucugcu

SEQ ID NO: 2865 - RNA, 19 nt, Homo sapiens
accucuccugcuucugcug

SEQ ID NO: 2866 - RNA, 19 nt, Homo sapiens
ccucuccugcuucugcugc

SEQ ID NO: 2867 - RNA, 19 nt, Homo sapiens
cucuccugcuucugcugcu

SEQ ID NO: 2868 - RNA, 19 nt, Homo sapiens
ucuccugcuucugcugcug

SEQ ID NO: 2869 - RNA, 19 nt, Homo sapiens
cuccugcuucugcugcugc

SEQ ID NO: 2870 - RNA, 19 nt, Homo sapiens
uccugcuucugcugcugcc

SEQ ID NO: 2871 - RNA, 19 nt, Homo sapiens
ccugcuucugcugcugccu

SEQ ID NO: 2872 - RNA, 19 nt, Homo sapiens
cugcuucugcugcugccuc

SEQ ID NO: 2873 - RNA, 19 nt, Homo sapiens
ugcuucugcugcugccucu

SEQ ID NO: 2874 - RNA, 19 nt, Homo sapiens
gcuucugcugcugccucug

SEQ ID NO: 2875 - RNA, 19 nt, Homo sapiens
cuucugcugcugccucugu

SEQ ID NO: 2876 - RNA, 19 nt, Homo sapiens
uucugcugcugccucugug

SEQ ID NO: 2877 - RNA, 19 nt, Homo sapiens
ucugcugcugccucugugu

SEQ ID NO: 2878 - RNA, 19 nt, Homo sapiens
cugcugcugccucuguguc

SEQ ID NO: 2879 - RNA, 19 nt, Homo sapiens
ugcugcugccucugugucc

SEQ ID NO: 2880 - RNA, 19 nt, Homo sapiens
gcugcugccucuguguccc

SEQ ID NO: 2881 - RNA, 19 nt, Homo sapiens
cugcugccucugugucccg

SEQ ID NO: 2882 - RNA, 19 nt, Homo sapiens
ugcugccucugugucccgg

SEQ ID NO: 2883 - RNA, 19 nt, Homo sapiens
gcugccucugugucccggu

SEQ ID NO: 2884 - RNA, 19 nt, Homo sapiens
cugccucugugucccgguc

SEQ ID NO: 2885 - RNA, 19 nt, Homo sapiens
ugccucugugucccggucc

SEQ ID NO: 2886 - RNA, 19 nt, Homo sapiens
gccucugugucccgguccu

SEQ ID NO: 2887 - RNA, 19 nt, Homo sapiens
ccucugugucccgguccug

SEQ ID NO: 2888 - RNA, 19 nt, Homo sapiens
cucugugucccgguccugg

SEQ ID NO: 2889 - RNA, 19 nt, Homo sapiens
ucugugucccgguccuggu

SEQ ID NO: 2890 - RNA, 19 nt, Homo sapiens
cugugucccgguccugguc

SEQ ID NO: 2891 - RNA, 19 nt, Homo sapiens
ugugucccgguccuggucc

SEQ ID NO: 2892 - RNA, 19 nt, Homo sapiens
gugucccgguccugguccc

SEQ ID NO: 2893 - RNA, 19 nt, Homo sapiens
ugucccgguccuggucccg

SEQ ID NO: 2894 - RNA, 19 nt, Homo sapiens
gucccgguccuggucccgg

SEQ ID NO: 2895 - RNA, 19 nt, Homo sapiens
ucccgguccuggucccgga

SEQ ID NO: 2896 - RNA, 19 nt, Homo sapiens
cccgguccuggucccggac

SEQ ID NO: 2897 - RNA, 19 nt, Homo sapiens
ccgguccuggucccggacc

SEQ ID NO: 2898 - RNA, 19 nt, Homo sapiens
cgguccuggucccggaccc

SEQ ID NO: 2899 - RNA, 19 nt, Homo sapiens
gguccuggucccggacccg

SEQ ID NO: 2900 - RNA, 19 nt, Homo sapiens
guccuggucccggacccgg

SEQ ID NO: 2901 - RNA, 19 nt, Homo sapiens
uccuggucccggacccggg

SEQ ID NO: 2902 - RNA, 19 nt, Homo sapiens
ccuggucccggacccggga

SEQ ID NO: 2903 - RNA, 19 nt, Homo sapiens
cuggucccggacccgggag

SEQ ID NO: 2904 - RNA, 19 nt, Homo sapiens
uggucccggacccgggagc

SEQ ID NO: 2905 - RNA, 19 nt, Homo sapiens
ggucccggacccgggagcg

SEQ ID NO: 2906 - RNA, 19 nt, Homo sapiens
gucccggacccgggagcga

SEQ ID NO: 2907 - RNA, 19 nt, Homo sapiens
ucccggacccgggagcgag

SEQ ID NO: 2908 - RNA, 19 nt, Homo sapiens
cccggacccgggagcgagg

SEQ ID NO: 2909 - RNA, 19 nt, Homo sapiens
ccggacccgggagcgaggc

SEQ ID NO: 2910 - RNA, 19 nt, Homo sapiens
cggacccgggagcgaggca

SEQ ID NO: 2911 - RNA, 19 nt, Homo sapiens
ggacccgggagcgaggcaa

SEQ ID NO: 2912 - RNA, 19 nt, Homo sapiens
gacccgggagcgaggcaaa

SEQ ID NO: 2913 - RNA, 19 nt, Homo sapiens
acccgggagcgaggcaaag

SEQ ID NO: 2914 - RNA, 19 nt, Homo sapiens
cccgggagcgaggcaaagg

SEQ ID NO: 2915 - RNA, 19 nt, Homo sapiens
ccgggagcgaggcaaaggu

SEQ ID NO: 2916 - RNA, 19 nt, Homo sapiens
cgggagcgaggcaaagguc

SEQ ID NO: 2917 - RNA, 19 nt, Homo sapiens
gggagcgaggcaaagguca

SEQ ID NO: 2918 - RNA, 19 nt, Homo sapiens
ggagcgaggcaaaggucac

SEQ ID NO: 2919 - RNA, 19 nt, Homo sapiens
gagcgaggcaaaggucacc

SEQ ID NO: 2920 - RNA, 19 nt, Homo sapiens
agcgaggcaaaggucaccc

SEQ ID NO: 2921 - RNA, 19 nt, Homo sapiens
gcgaggcaaaggucacccg

SEQ ID NO: 2922 - RNA, 19 nt, Homo sapiens
cgaggcaaaggucacccgg

SEQ ID NO: 2923 - RNA, 19 nt, Homo sapiens
gaggcaaaggucacccgga

SEQ ID NO: 2924 - RNA, 19 nt, Homo sapiens
aggcaaaggucacccggag

SEQ ID NO: 2925 - RNA, 19 nt, Homo sapiens
ggcaaaggucacccggagu

SEQ ID NO: 2926 - RNA, 19 nt, Homo sapiens
gcaaaggucacccggaguu

SEQ ID NO: 2927 - RNA, 19 nt, Homo sapiens
caaaggucacccggaguug

SEQ ID NO: 2928 - RNA, 19 nt, Homo sapiens
aaaggucacccggaguugu

SEQ ID NO: 2929 - RNA, 19 nt, Homo sapiens
aaggucacccggaguugug

SEQ ID NO: 2930 - RNA, 19 nt, Homo sapiens
aggucacccggaguugugc

SEQ ID NO: 2931 - RNA, 19 nt, Homo sapiens
ggucacccggaguugugca

SEQ ID NO: 2932 - RNA, 19 nt, Homo sapiens
gucacccggaguugugcag

SEQ ID NO: 2933 - RNA, 19 nt, Homo sapiens
ucacccggaguugugcaga

SEQ ID NO: 2934 - RNA, 19 nt, Homo sapiens
cacccggaguugugcagag

SEQ ID NO: 2935 - RNA, 19 nt, Homo sapiens
acccggaguugugcagaga

SEQ ID NO: 2936 - RNA, 19 nt, Homo sapiens
cccggaguugugcagagac

SEQ ID NO: 2937 - RNA, 19 nt, Homo sapiens
ccggaguugugcagagacc

SEQ ID NO: 2938 - RNA, 19 nt, Homo sapiens
cggaguugugcagagaccc

SEQ ID NO: 2939 - RNA, 19 nt, Homo sapiens
ggaguugugcagagacccg

SEQ ID NO: 2940 - RNA, 19 nt, Homo sapiens
gaguugugcagagacccgg

SEQ ID NO: 2941 - RNA, 19 nt, Homo sapiens
aguugugcagagacccggc

SEQ ID NO: 2942 - RNA, 19 nt, Homo sapiens
guugugcagagacccggca

SEQ ID NO: 2943 - RNA, 19 nt, Homo sapiens
uugugcagagacccggcag

SEQ ID NO: 2944 - RNA, 19 nt, Homo sapiens
ugugcagagacccggcagg

SEQ ID NO: 2945 - RNA, 19 nt, Homo sapiens
gugcagagacccggcaggu

SEQ ID NO: 2946 - RNA, 19 nt, Homo sapiens
ugcagagacccggcaggug

SEQ ID NO: 2947 - RNA, 19 nt, Homo sapiens
gcagagacccggcaggugc

SEQ ID NO: 2948 - RNA, 19 nt, Homo sapiens
cagagacccggcaggugcu

SEQ ID NO: 2949 - RNA, 19 nt, Homo sapiens
agagacccggcaggugcug

SEQ ID NO: 2950 - RNA, 19 nt, Homo sapiens
gagacccggcaggugcugg

SEQ ID NO: 2951 - RNA, 19 nt, Homo sapiens
agacccggcaggugcuggg

SEQ ID NO: 2952 - RNA, 19 nt, Homo sapiens
gggauauagcuuaaaccua

SEQ ID NO: 2953 - RNA, 19 nt, Homo sapiens
ggauauagcuuaaaccuaa

SEQ ID NO: 2954 - RNA, 19 nt, Homo sapiens
gauauagcuuaaaccuaau

SEQ ID NO: 2955 - RNA, 19 nt, Homo sapiens
auauagcuuaaaccuaauc

SEQ ID NO: 2956 - RNA, 19 nt, Homo sapiens
uauagcuuaaaccuaaucc

SEQ ID NO: 2957 - RNA, 19 nt, Homo sapiens
auagcuuaaaccuaauccc

SEQ ID NO: 2958 - RNA, 19 nt, Homo sapiens
uagcuuaaaccuaaucccu

SEQ ID NO: 2959 - RNA, 19 nt, Homo sapiens
agcuuaaaccuaaucccuc

SEQ ID NO: 2960 - RNA, 19 nt, Homo sapiens
gcuuaaaccuaaucccucc

SEQ ID NO: 2961 - RNA, 19 nt, Homo sapiens
cuuaaaccuaaucccuccc

SEQ ID NO: 2962 - RNA, 19 nt, Homo sapiens
uuaaaccuaaucccucccg

SEQ ID NO: 2963 - RNA, 19 nt, Homo sapiens
uaaaccuaaucccucccgc

SEQ ID NO: 2964 - RNA, 19 nt, Homo sapiens
aaaccuaaucccucccgcc

SEQ ID NO: 2965 - RNA, 19 nt, Homo sapiens
aaccuaaucccucccgccc

SEQ ID NO: 2966 - RNA, 19 nt, Homo sapiens
accuaaucccucccgcccu

SEQ ID NO: 2967 - RNA, 19 nt, Homo sapiens
ccuaaucccucccgcccug

SEQ ID NO: 2968 - RNA, 19 nt, Homo sapiens
cuaaucccucccgcccuga

SEQ ID NO: 2969 - RNA, 19 nt, Homo sapiens
uaaucccucccgcccugau

SEQ ID NO: 2970 - RNA, 19 nt, Homo sapiens
aaucccucccgcccugauc

SEQ ID NO: 2971 - RNA, 19 nt, Homo sapiens
aucccucccgcccugaucu

SEQ ID NO: 2972 - RNA, 19 nt, Homo sapiens
ucccucccgcccugaucuc

SEQ ID NO: 2973 - RNA, 19 nt, Homo sapiens
cccucccgcccugaucuca

SEQ ID NO: 2974 - RNA, 19 nt, Homo sapiens
ccucccgcccugaucucag

SEQ ID NO: 2975 - RNA, 19 nt, Homo sapiens
cucccgcccugaucucagg

SEQ ID NO: 2976 - RNA, 19 nt, Homo sapiens
ucccgcccugaucucaggu

SEQ ID NO: 2977 - RNA, 19 nt, Homo sapiens
cccgcccugaucucaggug

SEQ ID NO: 2978 - RNA, 19 nt, Homo sapiens
ccgcccugaucucagguga

SEQ ID NO: 2979 - RNA, 19 nt, Homo sapiens
cgcccugaucucaggugag

SEQ ID NO: 2980 - RNA, 19 nt, Homo sapiens
gcccugaucucaggugagc

SEQ ID NO: 2981 - RNA, 19 nt, Homo sapiens
cccugaucucaggugagca

SEQ ID NO: 2982 - RNA, 19 nt, Homo sapiens
ccugaucucaggugagcac

SEQ ID NO: 2983 - RNA, 19 nt, Homo sapiens
cugaucucaggugagcacc

SEQ ID NO: 2984 - RNA, 19 nt, Homo sapiens
ugaucucaggugagcaccu

SEQ ID NO: 2985 - RNA, 19 nt, Homo sapiens
gaucucaggugagcaccuc

SEQ ID NO: 2986 - RNA, 19 nt, Homo sapiens
aucucaggugagcaccucc

SEQ ID NO: 2987 - RNA, 19 nt, Homo sapiens
ucucaggugagcaccuccg

SEQ ID NO: 2988 - RNA, 19 nt, Homo sapiens
cucaggugagcaccuccgg

SEQ ID NO: 2989 - RNA, 19 nt, Homo sapiens
ucaggugagcaccuccggg

SEQ ID NO: 2990 - RNA, 19 nt, Homo sapiens
caggugagcaccuccgggu

SEQ ID NO: 2991 - RNA, 19 nt, Homo sapiens
aggugagcaccuccggguc

SEQ ID NO: 2992 - RNA, 19 nt, Homo sapiens
ggugagcaccuccgggucu

SEQ ID NO: 2993 - RNA, 19 nt, Homo sapiens
gugagcaccuccgggucug

SEQ ID NO: 2994 - RNA, 19 nt, Homo sapiens
ugagcaccuccgggucugu

SEQ ID NO: 2995 - RNA, 19 nt, Homo sapiens
gagcaccuccgggucuguc

SEQ ID NO: 2996 - RNA, 19 nt, Homo sapiens
agcaccuccgggucugucc

SEQ ID NO: 2997 - RNA, 19 nt, Homo sapiens
gcaccuccgggucuguccc

SEQ ID NO: 2998 - RNA, 19 nt, Homo sapiens
cccaggaguacaccugcug

SEQ ID NO: 2999 - RNA, 19 nt, Homo sapiens
ccaggaguacaccugcugu

SEQ ID NO: 3000 - RNA, 19 nt, Homo sapiens
caggaguacaccugcuguu

SEQ ID NO: 3001 - RNA, 19 nt, Homo sapiens
aggaguacaccugcuguuc

SEQ ID NO: 3002 - RNA, 19 nt, Homo sapiens
ggaguacaccugcuguucc

SEQ ID NO: 3003 - RNA, 19 nt, Homo sapiens
gaguacaccugcuguucca

SEQ ID NO: 3004 - RNA, 19 nt, Homo sapiens
aguacaccugcuguuccag

SEQ ID NO: 3005 - RNA, 19 nt, Homo sapiens
guacaccugcuguuccagu

SEQ ID NO: 3006 - RNA, 19 nt, Homo sapiens
uacaccugcuguuccagug

SEQ ID NO: 3007 - RNA, 19 nt, Homo sapiens
acaccugcuguuccaguga

SEQ ID NO: 3008 - RNA, 19 nt, Homo sapiens
caccugcuguuccagugag

SEQ ID NO: 3009 - RNA, 19 nt, Homo sapiens
accugcuguuccagugaga

SEQ ID NO: 3010 - RNA, 19 nt, Homo sapiens
ccugcuguuccagugagac

SEQ ID NO: 3011 - RNA, 19 nt, Homo sapiens
cugcuguuccagugagaca

SEQ ID NO: 3012 - RNA, 19 nt, Homo sapiens
ugcuguuccagugagacag

SEQ ID NO: 3013 - RNA, 19 nt, Homo sapiens
gcuguuccagugagacaga

SEQ ID NO: 3014 - RNA, 19 nt, Homo sapiens
cuguuccagugagacagag

SEQ ID NO: 3015 - RNA, 19 nt, Homo sapiens
uguuccagugagacagagc

SEQ ID NO: 3016 - RNA, 19 nt, Homo sapiens
guuccagugagacagagca

SEQ ID NO: 3017 - RNA, 19 nt, Homo sapiens
uuccagugagacagagcag

SEQ ID NO: 3018 - RNA, 19 nt, Homo sapiens
uccagugagacagagcaga

SEQ ID NO: 3019 - RNA, 19 nt, Homo sapiens
ccagugagacagagcagag

SEQ ID NO: 3020 - RNA, 19 nt, Homo sapiens
cagugagacagagcagagg

SEQ ID NO: 3021 - RNA, 19 nt, Homo sapiens
agugagacagagcagaggc

SEQ ID NO: 3022 - RNA, 19 nt, Homo sapiens
gugagacagagcagaggcu

SEQ ID NO: 3023 - RNA, 19 nt, Homo sapiens
ugagacagagcagaggcug

SEQ ID NO: 3024 - RNA, 19 nt, Homo sapiens
gagacagagcagaggcuga

SEQ ID NO: 3025 - RNA, 19 nt, Homo sapiens
agacagagcagaggcugau

SEQ ID NO: 3026 - RNA, 19 nt, Homo sapiens
gacagagcagaggcugauc

SEQ ID NO: 3027 - RNA, 19 nt, Homo sapiens
acagagcagaggcugauca

SEQ ID NO: 3028 - RNA, 19 nt, Homo sapiens
cagagcagaggcugaucag

SEQ ID NO: 3029 - RNA, 19 nt, Homo sapiens
agagcagaggcugaucagg

SEQ ID NO: 3030 - RNA, 19 nt, Homo sapiens
gagcagaggcugaucaggg

SEQ ID NO: 3031 - RNA, 19 nt, Homo sapiens
agcagaggcugaucaggga

SEQ ID NO: 3032 - RNA, 19 nt, Homo sapiens
gcagaggcugaucagggag

SEQ ID NO: 3033 - RNA, 19 nt, Homo sapiens
cagaggcugaucagggaga

SEQ ID NO: 3034 - RNA, 19 nt, Homo sapiens
agaggcugaucagggagac

SEQ ID NO: 3035 - RNA, 19 nt, Homo sapiens
gaggcugaucagggagacu

SEQ ID NO: 3036 - RNA, 19 nt, Homo sapiens
aggcugaucagggagacug

SEQ ID NO: 3037 - RNA, 19 nt, Homo sapiens
ggcugaucagggagacuga

SEQ ID NO: 3038 - RNA, 19 nt, Homo sapiens
gcugaucagggagacugag

SEQ ID NO: 3039 - RNA, 19 nt, Homo sapiens
cugaucagggagacugagg

SEQ ID NO: 3040 - RNA, 19 nt, Homo sapiens
ugaucagggagacugaggc

SEQ ID NO: 3041 - RNA, 19 nt, Homo sapiens
gaucagggagacugaggcc

SEQ ID NO: 3042 - RNA, 19 nt, Homo sapiens
ccaccuuccgaggccuggu

SEQ ID NO: 3043 - RNA, 19 nt, Homo sapiens
caccuuccgaggccuggug

SEQ ID NO: 3044 - RNA, 19 nt, Homo sapiens
accuuccgaggccuggugg

SEQ ID NO: 3045 - RNA, 19 nt, Homo sapiens
ccuuccgaggccuggugga

SEQ ID NO: 3046 - RNA, 19 nt, Homo sapiens
cuuccgaggccugguggag

SEQ ID NO: 3047 - RNA, 19 nt, Homo sapiens
uuccgaggccugguggagg

SEQ ID NO: 3048 - RNA, 19 nt, Homo sapiens
uccgaggccugguggagga

SEQ ID NO: 3049 - RNA, 19 nt, Homo sapiens
ccgaggccugguggaggac

SEQ ID NO: 3050 - RNA, 19 nt, Homo sapiens
cgaggccugguggaggaca

SEQ ID NO: 3051 - RNA, 19 nt, Homo sapiens
gaggccugguggaggacag

SEQ ID NO: 3052 - RNA, 19 nt, Homo sapiens
aggccugguggaggacagc

SEQ ID NO: 3053 - RNA, 19 nt, Homo sapiens
ggccugguggaggacagcg

SEQ ID NO: 3054 - RNA, 19 nt, Homo sapiens
gccugguggaggacagcgg

SEQ ID NO: 3055 - RNA, 19 nt, Homo sapiens
ccugguggaggacagcggc

SEQ ID NO: 3056 - RNA, 19 nt, Homo sapiens
cugguggaggacagcggcu

SEQ ID NO: 3057 - RNA, 19 nt, Homo sapiens
ugguggaggacagcggcuc

SEQ ID NO: 3058 - RNA, 19 nt, Homo sapiens
gguggaggacagcggcucc

SEQ ID NO: 3059 - RNA, 19 nt, Homo sapiens
guggaggacagcggcuccu

SEQ ID NO: 3060 - RNA, 19 nt, Homo sapiens
uggaggacagcggcuccuu

SEQ ID NO: 3061 - RNA, 19 nt, Homo sapiens
ggaggacagcggcuccuuu

SEQ ID NO: 3062 - RNA, 19 nt, Homo sapiens
gaggacagcggcuccuuuc

SEQ ID NO: 3063 - RNA, 19 nt, Homo sapiens
aggacagcggcuccuuucu

SEQ ID NO: 3064 - RNA, 19 nt, Homo sapiens
ggacagcggcuccuuucug

SEQ ID NO: 3065 - RNA, 19 nt, Homo sapiens
gacagcggcuccuuucugg

SEQ ID NO: 3066 - RNA, 19 nt, Homo sapiens
acagcggcuccuuucuggu

SEQ ID NO: 3067 - RNA, 19 nt, Homo sapiens
cagcggcuccuuucugguu

SEQ ID NO: 3068 - RNA, 19 nt, Homo sapiens
agcggcuccuuucugguuc

SEQ ID NO: 3069 - RNA, 19 nt, Homo sapiens
gcggcuccuuucugguuca

SEQ ID NO: 3070 - RNA, 19 nt, Homo sapiens
cggcuccuuucugguucac

SEQ ID NO: 3071 - RNA, 19 nt, Homo sapiens
ggcuccuuucugguucaca

SEQ ID NO: 3072 - RNA, 19 nt, Homo sapiens
gcuccuuucugguucacac

SEQ ID NO: 3073 - RNA, 19 nt, Homo sapiens
uuucuggagaugcucucag

SEQ ID NO: 3074 - RNA, 19 nt, Homo sapiens
uucuggagaugcucucagu

SEQ ID NO: 3075 - RNA, 19 nt, Homo sapiens
ucuggagaugcucucagua

SEQ ID NO: 3076 - RNA, 19 nt, Homo sapiens
cuggagaugcucucaguag

SEQ ID NO: 3077 - RNA, 19 nt, Homo sapiens
uggagaugcucucaguagc

SEQ ID NO: 3078 - RNA, 19 nt, Homo sapiens
ggagaugcucucaguagcc

SEQ ID NO: 3079 - RNA, 19 nt, Homo sapiens
gagaugcucucaguagccc

SEQ ID NO: 3080 - RNA, 19 nt, Homo sapiens
agaugcucucaguagccca

SEQ ID NO: 3081 - RNA, 19 nt, Homo sapiens
gaugcucucaguagcccag

SEQ ID NO: 3082 - RNA, 19 nt, Homo sapiens
augcucucaguagcccagc

SEQ ID NO: 3083 - RNA, 19 nt, Homo sapiens
ugcucucaguagcccagca

SEQ ID NO: 3084 - RNA, 19 nt, Homo sapiens
gcucucaguagcccagcac

SEQ ID NO: 3085 - RNA, 19 nt, Homo sapiens
cucucaguagcccagcacu

SEQ ID NO: 3086 - RNA, 19 nt, Homo sapiens
ucucaguagcccagcacuc

SEQ ID NO: 3087 - RNA, 19 nt, Homo sapiens
cucaguagcccagcacucu

SEQ ID NO: 3088 - RNA, 19 nt, Homo sapiens
ucaguagcccagcacucuc

SEQ ID NO: 3089 - RNA, 19 nt, Homo sapiens
caguagcccagcacucucu

SEQ ID NO: 3090 - RNA, 19 nt, Homo sapiens
aguagcccagcacucucug

SEQ ID NO: 3091 - RNA, 19 nt, Homo sapiens
guagcccagcacucucuga

SEQ ID NO: 3092 - RNA, 19 nt, Homo sapiens
uagcccagcacucucugac

SEQ ID NO: 3093 - RNA, 19 nt, Homo sapiens
agcccagcacucucugacc

SEQ ID NO: 3094 - RNA, 19 nt, Homo sapiens
gcccagcacucucugaccc

SEQ ID NO: 3095 - RNA, 19 nt, Homo sapiens
cccagcacucucugaccca

SEQ ID NO: 3096 - RNA, 19 nt, Homo sapiens
ccagcacucucugacccag

SEQ ID NO: 3097 - RNA, 19 nt, Homo sapiens
cagcacucucugacccagc

SEQ ID NO: 3098 - RNA, 19 nt, Homo sapiens
agcacucucugacccagcu

SEQ ID NO: 3099 - RNA, 19 nt, Homo sapiens
gcacucucugacccagcuc

SEQ ID NO: 3100 - RNA, 19 nt, Homo sapiens
cacucucugacccagcucu

SEQ ID NO: 3101 - RNA, 19 nt, Homo sapiens
acucucugacccagcucuu

SEQ ID NO: 3102 - RNA, 19 nt, Homo sapiens
cucucugacccagcucuuc

SEQ ID NO: 3103 - RNA, 19 nt, Homo sapiens
ucucugacccagcucuucu

SEQ ID NO: 3104 - RNA, 19 nt, Homo sapiens
cucugacccagcucuucuc

SEQ ID NO: 3105 - RNA, 19 nt, Homo sapiens
ucugacccagcucuucucc

SEQ ID NO: 3106 - RNA, 19 nt, Homo sapiens
cugacccagcucuucuccc

SEQ ID NO: 3107 - RNA, 19 nt, Homo sapiens
ugacccagcucuucuccca

SEQ ID NO: 3108 - RNA, 19 nt, Homo sapiens
gacccagcucuucucccac

SEQ ID NO: 3109 - RNA, 19 nt, Homo sapiens
acccagcucuucucccacu

SEQ ID NO: 3110 - RNA, 19 nt, Homo sapiens
cccagcucuucucccacuc

SEQ ID NO: 3111 - RNA, 19 nt, Homo sapiens
ccagcucuucucccacucc

SEQ ID NO: 3112 - RNA, 19 nt, Homo sapiens
cagcucuucucccacuccu

SEQ ID NO: 3113 - RNA, 19 nt, Homo sapiens
agcucuucucccacuccua

SEQ ID NO: 3114 - RNA, 19 nt, Homo sapiens
gcucuucucccacuccuac

SEQ ID NO: 3115 - RNA, 19 nt, Homo sapiens
cucuucucccacuccuacg

SEQ ID NO: 3116 - RNA, 19 nt, Homo sapiens
ucuucucccacuccuacgg

SEQ ID NO: 3117 - RNA, 19 nt, Homo sapiens
cuucucccacuccuacggc

SEQ ID NO: 3118 - RNA, 19 nt, Homo sapiens
uucucccacuccuacggcc

SEQ ID NO: 3119 - RNA, 19 nt, Homo sapiens
ucucccacuccuacggccg

SEQ ID NO: 3120 - RNA, 19 nt, Homo sapiens
cucccacuccuacggccgc

SEQ ID NO: 3121 - RNA, 19 nt, Homo sapiens
ucccacuccuacggccgcc

SEQ ID NO: 3122 - RNA, 19 nt, Homo sapiens
cccacuccuacggccgccu

SEQ ID NO: 3123 - RNA, 19 nt, Homo sapiens
ccacuccuacggccgccug

SEQ ID NO: 3124 - RNA, 19 nt, Homo sapiens
cacuccuacggccgccugu

SEQ ID NO: 3125 - RNA, 19 nt, Homo sapiens
acuccuacggccgccugua

SEQ ID NO: 3126 - RNA, 19 nt, Homo sapiens
cuccuacggccgccuguau

SEQ ID NO: 3127 - RNA, 19 nt, Homo sapiens
uccuacggccgccuguaug

SEQ ID NO: 3128 - RNA, 19 nt, Homo sapiens
ccuacggccgccuguaugc

SEQ ID NO: 3129 - RNA, 19 nt, Homo sapiens
cuacggccgccuguaugcc

SEQ ID NO: 3130 - RNA, 19 nt, Homo sapiens
uacggccgccuguaugccc

SEQ ID NO: 3131 - RNA, 19 nt, Homo sapiens
acggccgccuguaugccca

SEQ ID NO: 3132 - RNA, 19 nt, Homo sapiens
cggccgccuguaugcccag

SEQ ID NO: 3133 - RNA, 19 nt, Homo sapiens
ggccgccuguaugcccagc

SEQ ID NO: 3134 - RNA, 19 nt, Homo sapiens
gccgccuguaugcccagca

SEQ ID NO: 3135 - RNA, 19 nt, Homo sapiens
ccgccuguaugcccagcac

SEQ ID NO: 3136 - RNA, 19 nt, Homo sapiens
cgccuguaugcccagcacg

SEQ ID NO: 3137 - RNA, 19 nt, Homo sapiens
gccuguaugcccagcacgc

SEQ ID NO: 3138 - RNA, 19 nt, Homo sapiens
ccuguaugcccagcacgcc

SEQ ID NO: 3139 - RNA, 19 nt, Homo sapiens
cuguaugcccagcacgccc

SEQ ID NO: 3140 - RNA, 19 nt, Homo sapiens
uguaugcccagcacgcccu

SEQ ID NO: 3141 - RNA, 19 nt, Homo sapiens
guaugcccagcacgcccuc

SEQ ID NO: 3142 - RNA, 19 nt, Homo sapiens
uaugcccagcacgcccuca

SEQ ID NO: 3143 - RNA, 19 nt, Homo sapiens
augcccagcacgcccucau

SEQ ID NO: 3144 - RNA, 19 nt, Homo sapiens
ugcccagcacgcccucaua

SEQ ID NO: 3145 - RNA, 19 nt, Homo sapiens
gcccagcacgcccucauau

SEQ ID NO: 3146 - RNA, 19 nt, Homo sapiens
cccagcacgcccucauauu

SEQ ID NO: 3147 - RNA, 19 nt, Homo sapiens
ccagcacgcccucauauuc

SEQ ID NO: 3148 - RNA, 19 nt, Homo sapiens
cagcacgcccucauauuca

SEQ ID NO: 3149 - RNA, 19 nt, Homo sapiens
agcacgcccucauauucaa

SEQ ID NO: 3150 - RNA, 19 nt, Homo sapiens
gcacgcccucauauucaau

SEQ ID NO: 3151 - RNA, 19 nt, Homo sapiens
cacgcccucauauucaaug

SEQ ID NO: 3152 - RNA, 19 nt, Homo sapiens
acgcccucauauucaaugg

SEQ ID NO: 3153 - RNA, 19 nt, Homo sapiens
ggccuguucucucggcugc

SEQ ID NO: 3154 - RNA, 19 nt, Homo sapiens
gccuguucucucggcugcg

SEQ ID NO: 3155 - RNA, 19 nt, Homo sapiens
ccuguucucucggcugcga

SEQ ID NO: 3156 - RNA, 19 nt, Homo sapiens
cuguucucucggcugcgag

SEQ ID NO: 3157 - RNA, 19 nt, Homo sapiens
uguucucucggcugcgaga

SEQ ID NO: 3158 - RNA, 19 nt, Homo sapiens
guucucucggcugcgagac

SEQ ID NO: 3159 - RNA, 19 nt, Homo sapiens
uucucucggcugcgagacu

SEQ ID NO: 3160 - RNA, 19 nt, Homo sapiens
ucucucggcugcgagacuu

SEQ ID NO: 3161 - RNA, 19 nt, Homo sapiens
cucucggcugcgagacuuc

SEQ ID NO: 3162 - RNA, 19 nt, Homo sapiens
ucucggcugcgagacuucu

SEQ ID NO: 3163 - RNA, 19 nt, Homo sapiens
cucggcugcgagacuucua

SEQ ID NO: 3164 - RNA, 19 nt, Homo sapiens
ucggcugcgagacuucuau

SEQ ID NO: 3165 - RNA, 19 nt, Homo sapiens
cggcugcgagacuucuaug

SEQ ID NO: 3166 - RNA, 19 nt, Homo sapiens
ggcugcgagacuucuaugg

SEQ ID NO: 3167 - RNA, 19 nt, Homo sapiens
gcugcgagacuucuauggg

SEQ ID NO: 3168 - RNA, 19 nt, Homo sapiens
ggguuggaugacacccugg

SEQ ID NO: 3169 - RNA, 19 nt, Homo sapiens
ggcggauuucugggcacag

SEQ ID NO: 3170 - RNA, 19 nt, Homo sapiens
gcggauuucugggcacagc

SEQ ID NO: 3171 - RNA, 19 nt, Homo sapiens
cggauuucugggcacagcu

SEQ ID NO: 3172 - RNA, 19 nt, Homo sapiens
ggauuucugggcacagcuc

SEQ ID NO: 3173 - RNA, 19 nt, Homo sapiens
gauuucugggcacagcucc

SEQ ID NO: 3174 - RNA, 19 nt, Homo sapiens
auuucugggcacagcuccu

SEQ ID NO: 3175 - RNA, 19 nt, Homo sapiens
uuucugggcacagcuccug

SEQ ID NO: 3176 - RNA, 19 nt, Homo sapiens
uucugggcacagcuccugg

SEQ ID NO: 3177 - RNA, 19 nt, Homo sapiens
ucugggcacagcuccugga

SEQ ID NO: 3178 - RNA, 19 nt, Homo sapiens
cugggcacagcuccuggag

SEQ ID NO: 3179 - RNA, 19 nt, Homo sapiens
ugggcacagcuccuggaga

SEQ ID NO: 3180 - RNA, 19 nt, Homo sapiens
gggcacagcuccuggagag

SEQ ID NO: 3181 - RNA, 19 nt, Homo sapiens
ggcacagcuccuggagaga

SEQ ID NO: 3182 - RNA, 19 nt, Homo sapiens
gcacagcuccuggagagag

SEQ ID NO: 3183 - RNA, 19 nt, Homo sapiens
cacagcuccuggagagagu

SEQ ID NO: 3184 - RNA, 19 nt, Homo sapiens
acagcuccuggagagagug

SEQ ID NO: 3185 - RNA, 19 nt, Homo sapiens
cagcuccuggagagagugu

SEQ ID NO: 3186 - RNA, 19 nt, Homo sapiens
agcuccuggagagaguguu

SEQ ID NO: 3187 - RNA, 19 nt, Homo sapiens
gcuccuggagagaguguuc

SEQ ID NO: 3188 - RNA, 19 nt, Homo sapiens
cuccuggagagaguguucc

SEQ ID NO: 3189 - RNA, 19 nt, Homo sapiens
uccuggagagaguguuccc

SEQ ID NO: 3190 - RNA, 19 nt, Homo sapiens
ccuggagagaguguucccg

SEQ ID NO: 3191 - RNA, 19 nt, Homo sapiens
cuggagagaguguucccgc

SEQ ID NO: 3192 - RNA, 19 nt, Homo sapiens
uggagagaguguucccgcu

SEQ ID NO: 3193 - RNA, 19 nt, Homo sapiens
ggagagaguguucccgcug

SEQ ID NO: 3194 - RNA, 19 nt, Homo sapiens
gagagaguguucccgcugc

SEQ ID NO: 3195 - RNA, 19 nt, Homo sapiens
agagaguguucccgcugcu

SEQ ID NO: 3196 - RNA, 19 nt, Homo sapiens
gagaguguucccgcugcug

SEQ ID NO: 3197 - RNA, 19 nt, Homo sapiens
agaguguucccgcugcugc

SEQ ID NO: 3198 - RNA, 19 nt, Homo sapiens
gaguguucccgcugcugca

SEQ ID NO: 3199 - RNA, 19 nt, Homo sapiens
aguguucccgcugcugcac

SEQ ID NO: 3200 - RNA, 19 nt, Homo sapiens
guguucccgcugcugcacc

SEQ ID NO: 3201 - RNA, 19 nt, Homo sapiens
uguucccgcugcugcaccc

SEQ ID NO: 3202 - RNA, 19 nt, Homo sapiens
guucccgcugcugcaccca

SEQ ID NO: 3203 - RNA, 19 nt, Homo sapiens
uucccgcugcugcacccac

SEQ ID NO: 3204 - RNA, 19 nt, Homo sapiens
ucccgcugcugcacccaca

SEQ ID NO: 3205 - RNA, 19 nt, Homo sapiens
cccgcugcugcacccacag

SEQ ID NO: 3206 - RNA, 19 nt, Homo sapiens
ccgcugcugcacccacagu

SEQ ID NO: 3207 - RNA, 19 nt, Homo sapiens
cgcugcugcacccacagua

SEQ ID NO: 3208 - RNA, 19 nt, Homo sapiens
gcugcugcacccacaguac

SEQ ID NO: 3209 - RNA, 19 nt, Homo sapiens
cugcugcacccacaguaca

SEQ ID NO: 3210 - RNA, 19 nt, Homo sapiens
ugcugcacccacaguacag

SEQ ID NO: 3211 - RNA, 19 nt, Homo sapiens
gcugcacccacaguacagc

SEQ ID NO: 3212 - RNA, 19 nt, Homo sapiens
cugcacccacaguacagcu

SEQ ID NO: 3213 - RNA, 19 nt, Homo sapiens
ugcacccacaguacagcuu

SEQ ID NO: 3214 - RNA, 19 nt, Homo sapiens
gcacccacaguacagcuuc

SEQ ID NO: 3215 - RNA, 19 nt, Homo sapiens
cacccacaguacagcuucc

SEQ ID NO: 3216 - RNA, 19 nt, Homo sapiens
acccacaguacagcuuccc

SEQ ID NO: 3217 - RNA, 19 nt, Homo sapiens
cccugacuaccugcucugc

SEQ ID NO: 3218 - RNA, 19 nt, Homo sapiens
ccugacuaccugcucugcc

SEQ ID NO: 3219 - RNA, 19 nt, Homo sapiens
cugacuaccugcucugccu

SEQ ID NO: 3220 - RNA, 19 nt, Homo sapiens
ugacuaccugcucugccuc

SEQ ID NO: 3221 - RNA, 19 nt, Homo sapiens
gacuaccugcucugccucu

SEQ ID NO: 3222 - RNA, 19 nt, Homo sapiens
acuaccugcucugccucuc

SEQ ID NO: 3223 - RNA, 19 nt, Homo sapiens
cuaccugcucugccucuca

SEQ ID NO: 3224 - RNA, 19 nt, Homo sapiens
uaccugcucugccucucac

SEQ ID NO: 3225 - RNA, 19 nt, Homo sapiens
accugcucugccucucacg

SEQ ID NO: 3226 - RNA, 19 nt, Homo sapiens
ccugcucugccucucacgc

SEQ ID NO: 3227 - RNA, 19 nt, Homo sapiens
cugcucugccucucacgcu

SEQ ID NO: 3228 - RNA, 19 nt, Homo sapiens
ugcucugccucucacgcuu

SEQ ID NO: 3229 - RNA, 19 nt, Homo sapiens
gcucugccucucacgcuug

SEQ ID NO: 3230 - RNA, 19 nt, Homo sapiens
cucugccucucacgcuugg

SEQ ID NO: 3231 - RNA, 19 nt, Homo sapiens
ggcucucugcagcccuuug

SEQ ID NO: 3232 - RNA, 19 nt, Homo sapiens
gcucucugcagcccuuugg

SEQ ID NO: 3233 - RNA, 19 nt, Homo sapiens
cucucugcagcccuuuggg

SEQ ID NO: 3234 - RNA, 19 nt, Homo sapiens
cccgccgccuccgccugca

SEQ ID NO: 3235 - RNA, 19 nt, Homo sapiens
ccgccgccuccgccugcag

SEQ ID NO: 3236 - RNA, 19 nt, Homo sapiens
cgccgccuccgccugcaga

SEQ ID NO: 3237 - RNA, 19 nt, Homo sapiens
gccgccuccgccugcagau

SEQ ID NO: 3238 - RNA, 19 nt, Homo sapiens
ccgccuccgccugcagaua

SEQ ID NO: 3239 - RNA, 19 nt, Homo sapiens
cgccuccgccugcagauaa

SEQ ID NO: 3240 - RNA, 19 nt, Homo sapiens
gccuccgccugcagauaac

SEQ ID NO: 3241 - RNA, 19 nt, Homo sapiens
ccuccgccugcagauaacc

SEQ ID NO: 3242 - RNA, 19 nt, Homo sapiens
cuccgccugcagauaaccc

SEQ ID NO: 3243 - RNA, 19 nt, Homo sapiens
uccgccugcagauaacccg

SEQ ID NO: 3244 - RNA, 19 nt, Homo sapiens
ccgccugcagauaacccgg

SEQ ID NO: 3245 - RNA, 19 nt, Homo sapiens
cgccugcagauaacccgga

SEQ ID NO: 3246 - RNA, 19 nt, Homo sapiens
gccugcagauaacccggac

SEQ ID NO: 3247 - RNA, 19 nt, Homo sapiens
ccugcagauaacccggacc

SEQ ID NO: 3248 - RNA, 19 nt, Homo sapiens
cugcagauaacccggaccc

SEQ ID NO: 3249 - RNA, 19 nt, Homo sapiens
ugcagauaacccggacccu

SEQ ID NO: 3250 - RNA, 19 nt, Homo sapiens
gcagauaacccggacccug

SEQ ID NO: 3251 - RNA, 19 nt, Homo sapiens
cagauaacccggacccugg

SEQ ID NO: 3252 - RNA, 19 nt, Homo sapiens
agauaacccggacccuggu

SEQ ID NO: 3253 - RNA, 19 nt, Homo sapiens
gauaacccggacccuggug

SEQ ID NO: 3254 - RNA, 19 nt, Homo sapiens
auaacccggacccuggugg

SEQ ID NO: 3255 - RNA, 19 nt, Homo sapiens
ggcugcccgagccuuugug

SEQ ID NO: 3256 - RNA, 19 nt, Homo sapiens
gcugcccgagccuuugugc

SEQ ID NO: 3257 - RNA, 19 nt, Homo sapiens
cugcccgagccuuugugca

SEQ ID NO: 3258 - RNA, 19 nt, Homo sapiens
ugcccgagccuuugugcag

SEQ ID NO: 3259 - RNA, 19 nt, Homo sapiens
gcccgagccuuugugcagg

SEQ ID NO: 3260 - RNA, 19 nt, Homo sapiens
cccgagccuuugugcaggg

SEQ ID NO: 3261 - RNA, 19 nt, Homo sapiens
ccgagccuuugugcagggc

SEQ ID NO: 3262 - RNA, 19 nt, Homo sapiens
cgagccuuugugcagggcc

SEQ ID NO: 3263 - RNA, 19 nt, Homo sapiens
gagccuuugugcagggccu

SEQ ID NO: 3264 - RNA, 19 nt, Homo sapiens
agccuuugugcagggccug

SEQ ID NO: 3265 - RNA, 19 nt, Homo sapiens
gccuuugugcagggccugg

SEQ ID NO: 3266 - RNA, 19 nt, Homo sapiens
ccuuugugcagggccugga

SEQ ID NO: 3267 - RNA, 19 nt, Homo sapiens
cuuugugcagggccuggag

SEQ ID NO: 3268 - RNA, 19 nt, Homo sapiens
uuugugcagggccuggaga

SEQ ID NO: 3269 - RNA, 19 nt, Homo sapiens
uugugcagggccuggagac

SEQ ID NO: 3270 - RNA, 19 nt, Homo sapiens
ugugcagggccuggagacu

SEQ ID NO: 3271 - RNA, 19 nt, Homo sapiens
gugcagggccuggagacug

SEQ ID NO: 3272 - RNA, 19 nt, Homo sapiens
ugcagggccuggagacugg

SEQ ID NO: 3273 - RNA, 19 nt, Homo sapiens
gcagggccuggagacugga

SEQ ID NO: 3274 - RNA, 19 nt, Homo sapiens
cagggccuggagacuggaa

SEQ ID NO: 3275 - RNA, 19 nt, Homo sapiens
agggccuggagacuggaag

SEQ ID NO: 3276 - RNA, 19 nt, Homo sapiens
gggccuggagacuggaaga

SEQ ID NO: 3277 - RNA, 19 nt, Homo sapiens
ggccuggagacuggaagaa

SEQ ID NO: 3278 - RNA, 19 nt, Homo sapiens
gccuggagacuggaagaaa

SEQ ID NO: 3279 - RNA, 19 nt, Homo sapiens
ccuggagacuggaagaaau

SEQ ID NO: 3280 - RNA, 19 nt, Homo sapiens
cuggagacuggaagaaaug

SEQ ID NO: 3281 - RNA, 19 nt, Homo sapiens
uggagacuggaagaaaugu

SEQ ID NO: 3282 - RNA, 19 nt, Homo sapiens
ggagacuggaagaaaugug

SEQ ID NO: 3283 - RNA, 19 nt, Homo sapiens
gagacuggaagaaaugugg

SEQ ID NO: 3284 - RNA, 19 nt, Homo sapiens
agacuggaagaaauguggu

SEQ ID NO: 3285 - RNA, 19 nt, Homo sapiens
gacuggaagaaaugugguc

SEQ ID NO: 3286 - RNA, 19 nt, Homo sapiens
acuggaagaaaugugguca

SEQ ID NO: 3287 - RNA, 19 nt, Homo sapiens
cuggaagaaauguggucag

SEQ ID NO: 3288 - RNA, 19 nt, Homo sapiens
uggaagaaauguggucagc

SEQ ID NO: 3289 - RNA, 19 nt, Homo sapiens
ggaagaaauguggucagcg

SEQ ID NO: 3290 - RNA, 19 nt, Homo sapiens
gaagaaauguggucagcga

SEQ ID NO: 3291 - RNA, 19 nt, Homo sapiens
aagaaauguggucagcgaa

SEQ ID NO: 3292 - RNA, 19 nt, Homo sapiens
agaaauguggucagcgaag

SEQ ID NO: 3293 - RNA, 19 nt, Homo sapiens
gaaauguggucagcgaagc

SEQ ID NO: 3294 - RNA, 19 nt, Homo sapiens
aaauguggucagcgaagcg

SEQ ID NO: 3295 - RNA, 19 nt, Homo sapiens
aauguggucagcgaagcgc

SEQ ID NO: 3296 - RNA, 19 nt, Homo sapiens
auguggucagcgaagcgcu

SEQ ID NO: 3297 - RNA, 19 nt, Homo sapiens
uguggucagcgaagcgcuu

SEQ ID NO: 3298 - RNA, 19 nt, Homo sapiens
guggucagcgaagcgcuua

SEQ ID NO: 3299 - RNA, 19 nt, Homo sapiens
uggucagcgaagcgcuuaa

SEQ ID NO: 3300 - RNA, 19 nt, Homo sapiens
ggucagcgaagcgcuuaag

SEQ ID NO: 3301 - RNA, 19 nt, Homo sapiens
gucagcgaagcgcuuaagg

SEQ ID NO: 3302 - RNA, 19 nt, Homo sapiens
ucagcgaagcgcuuaaggu

SEQ ID NO: 3303 - RNA, 19 nt, Homo sapiens
cagcgaagcgcuuaaggug

SEQ ID NO: 3304 - RNA, 19 nt, Homo sapiens
agcgaagcgcuuaaggugc

SEQ ID NO: 3305 - RNA, 19 nt, Homo sapiens
gcgaagcgcuuaaggugcc

SEQ ID NO: 3306 - RNA, 19 nt, Homo sapiens
cgaagcgcuuaaggugccg

SEQ ID NO: 3307 - RNA, 19 nt, Homo sapiens
gaagcgcuuaaggugccgg

SEQ ID NO: 3308 - RNA, 19 nt, Homo sapiens
aagcgcuuaaggugccggu

SEQ ID NO: 3309 - RNA, 19 nt, Homo sapiens
agcgcuuaaggugccggug

SEQ ID NO: 3310 - RNA, 19 nt, Homo sapiens
gcgcuuaaggugccggugu

SEQ ID NO: 3311 - RNA, 19 nt, Homo sapiens
cgcuuaaggugccgguguc

SEQ ID NO: 3312 - RNA, 19 nt, Homo sapiens
gcuuaaggugccggugucu

SEQ ID NO: 3313 - RNA, 19 nt, Homo sapiens
cuuaaggugccggugucug

SEQ ID NO: 3314 - RNA, 19 nt, Homo sapiens
uuaaggugccggugucuga

SEQ ID NO: 3315 - RNA, 19 nt, Homo sapiens
uaaggugccggugucugaa

SEQ ID NO: 3316 - RNA, 19 nt, Homo sapiens
aaggugccggugucugaag

SEQ ID NO: 3317 - RNA, 19 nt, Homo sapiens
aggugccggugucugaagg

SEQ ID NO: 3318 - RNA, 19 nt, Homo sapiens
ggugccggugucugaaggc

SEQ ID NO: 3319 - RNA, 19 nt, Homo sapiens
gugccggugucugaaggcu

SEQ ID NO: 3320 - RNA, 19 nt, Homo sapiens
ugccggugucugaaggcug

SEQ ID NO: 3321 - RNA, 19 nt, Homo sapiens
gccggugucugaaggcugc

SEQ ID NO: 3322 - RNA, 19 nt, Homo sapiens
ccggugucugaaggcugca

SEQ ID NO: 3323 - RNA, 19 nt, Homo sapiens
cggugucugaaggcugcag

SEQ ID NO: 3324 - RNA, 19 nt, Homo sapiens
ggugucugaaggcugcagc

SEQ ID NO: 3325 - RNA, 19 nt, Homo sapiens
gugucugaaggcugcagcc

SEQ ID NO: 3326 - RNA, 19 nt, Homo sapiens
ccaggcucugaugcgucuc

SEQ ID NO: 3327 - RNA, 19 nt, Homo sapiens
caggcucugaugcgucuca

SEQ ID NO: 3328 - RNA, 19 nt, Homo sapiens
aggcucugaugcgucucau

SEQ ID NO: 3329 - RNA, 19 nt, Homo sapiens
ggcucugaugcgucucauc

SEQ ID NO: 3330 - RNA, 19 nt, Homo sapiens
gcucugaugcgucucaucg

SEQ ID NO: 3331 - RNA, 19 nt, Homo sapiens
cucugaugcgucucaucgg

SEQ ID NO: 3332 - RNA, 19 nt, Homo sapiens
ucugaugcgucucaucggc

SEQ ID NO: 3333 - RNA, 19 nt, Homo sapiens
cugaugcgucucaucggcu

SEQ ID NO: 3334 - RNA, 19 nt, Homo sapiens
ugaugcgucucaucggcug

SEQ ID NO: 3335 - RNA, 19 nt, Homo sapiens
gaugcgucucaucggcugu

SEQ ID NO: 3336 - RNA, 19 nt, Homo sapiens
augcgucucaucggcuguc

SEQ ID NO: 3337 - RNA, 19 nt, Homo sapiens
ugcgucucaucggcugucc

SEQ ID NO: 3338 - RNA, 19 nt, Homo sapiens
gcgucucaucggcuguccc

SEQ ID NO: 3339 - RNA, 19 nt, Homo sapiens
cccucacuuaugcccugcc

SEQ ID NO: 3340 - RNA, 19 nt, Homo sapiens
ccagggcuucugccucaac

SEQ ID NO: 3341 - RNA, 19 nt, Homo sapiens
cagggcuucugccucaacg

SEQ ID NO: 3342 - RNA, 19 nt, Homo sapiens
agggcuucugccucaacgu

SEQ ID NO: 3343 - RNA, 19 nt, Homo sapiens
gggcuucugccucaacgug

SEQ ID NO: 3344 - RNA, 19 nt, Homo sapiens
ggcuucugccucaacgugg

SEQ ID NO: 3345 - RNA, 19 nt, Homo sapiens
gcuucugccucaacguggu

SEQ ID NO: 3346 - RNA, 19 nt, Homo sapiens
cuucugccucaacgugguu

SEQ ID NO: 3347 - RNA, 19 nt, Homo sapiens
uucugccucaacgugguuc

SEQ ID NO: 3348 - RNA, 19 nt, Homo sapiens
ucugccucaacgugguucg

SEQ ID NO: 3349 - RNA, 19 nt, Homo sapiens
cugccucaacgugguucgu

SEQ ID NO: 3350 - RNA, 19 nt, Homo sapiens
ugccucaacgugguucgug

SEQ ID NO: 3351 - RNA, 19 nt, Homo sapiens
gccucaacgugguucgugg

SEQ ID NO: 3352 - RNA, 19 nt, Homo sapiens
ggcugucucagcagcaggg

SEQ ID NO: 3353 - RNA, 19 nt, Homo sapiens
gggacuggagccugacugg

SEQ ID NO: 3354 - RNA, 19 nt, Homo sapiens
ggacuggagccugacuggg

SEQ ID NO: 3355 - RNA, 19 nt, Homo sapiens
gggcaacuaucuggauggu

SEQ ID NO: 3356 - RNA, 19 nt, Homo sapiens
ggcaacuaucuggaugguc

SEQ ID NO: 3357 - RNA, 19 nt, Homo sapiens
gcaacuaucuggauggucu

SEQ ID NO: 3358 - RNA, 19 nt, Homo sapiens
caacuaucuggauggucuc

SEQ ID NO: 3359 - RNA, 19 nt, Homo sapiens
aacuaucuggauggucucc

SEQ ID NO: 3360 - RNA, 19 nt, Homo sapiens
acuaucuggauggucuccu

SEQ ID NO: 3361 - RNA, 19 nt, Homo sapiens
cuaucuggauggucuccug

SEQ ID NO: 3362 - RNA, 19 nt, Homo sapiens
uaucuggauggucuccuga

SEQ ID NO: 3363 - RNA, 19 nt, Homo sapiens
aucuggauggucuccugau

SEQ ID NO: 3364 - RNA, 19 nt, Homo sapiens
ucuggauggucuccugauc

SEQ ID NO: 3365 - RNA, 19 nt, Homo sapiens
cuggauggucuccugaucc

SEQ ID NO: 3366 - RNA, 19 nt, Homo sapiens
uggauggucuccugauccu

SEQ ID NO: 3367 - RNA, 19 nt, Homo sapiens
ggauggucuccugauccug

SEQ ID NO: 3368 - RNA, 19 nt, Homo sapiens
gauggucuccugauccugg

SEQ ID NO: 3369 - RNA, 19 nt, Homo sapiens
ggcugauaagcuccagggc

SEQ ID NO: 3370 - RNA, 19 nt, Homo sapiens
gcugauaagcuccagggcc

SEQ ID NO: 3371 - RNA, 19 nt, Homo sapiens
cugauaagcuccagggccc

SEQ ID NO: 3372 - RNA, 19 nt, Homo sapiens
uuuccuuugagcugacggc

SEQ ID NO: 3373 - RNA, 19 nt, Homo sapiens
uuccuuugagcugacggcc

SEQ ID NO: 3374 - RNA, 19 nt, Homo sapiens
uccuuugagcugacggccg

SEQ ID NO: 3375 - RNA, 19 nt, Homo sapiens
ccuuugagcugacggccga

SEQ ID NO: 3376 - RNA, 19 nt, Homo sapiens
cuuugagcugacggccgag

SEQ ID NO: 3377 - RNA, 19 nt, Homo sapiens
uuugagcugacggccgagu

SEQ ID NO: 3378 - RNA, 19 nt, Homo sapiens
uugagcugacggccgaguc

SEQ ID NO: 3379 - RNA, 19 nt, Homo sapiens
ugagcugacggccgagucc

SEQ ID NO: 3380 - RNA, 19 nt, Homo sapiens
gagcugacggccgagucca

SEQ ID NO: 3381 - RNA, 19 nt, Homo sapiens
agcugacggccgaguccau

SEQ ID NO: 3382 - RNA, 19 nt, Homo sapiens
gcugacggccgaguccauu

SEQ ID NO: 3383 - RNA, 19 nt, Homo sapiens
cugacggccgaguccauug

SEQ ID NO: 3384 - RNA, 19 nt, Homo sapiens
ugacggccgaguccauugg

SEQ ID NO: 3385 - RNA, 19 nt, Homo sapiens
gacggccgaguccauuggg

SEQ ID NO: 3386 - RNA, 19 nt, Homo sapiens
gggugaagaucucggaggg

SEQ ID NO: 3387 - RNA, 19 nt, Homo sapiens
ggugaagaucucggagggu

SEQ ID NO: 3388 - RNA, 19 nt, Homo sapiens
gugaagaucucggaggguu

SEQ ID NO: 3389 - RNA, 19 nt, Homo sapiens
ugaagaucucggaggguuu

SEQ ID NO: 3390 - RNA, 19 nt, Homo sapiens
gaagaucucggaggguuug

SEQ ID NO: 3391 - RNA, 19 nt, Homo sapiens
aagaucucggaggguuuga

SEQ ID NO: 3392 - RNA, 19 nt, Homo sapiens
agaucucggaggguuugau

SEQ ID NO: 3393 - RNA, 19 nt, Homo sapiens
gaucucggaggguuugaug

SEQ ID NO: 3394 - RNA, 19 nt, Homo sapiens
aucucggaggguuugaugu

SEQ ID NO: 3395 - RNA, 19 nt, Homo sapiens
ucucggaggguuugaugua

SEQ ID NO: 3396 - RNA, 19 nt, Homo sapiens
cucggaggguuugauguac

SEQ ID NO: 3397 - RNA, 19 nt, Homo sapiens
ucggaggguuugauguacc

SEQ ID NO: 3398 - RNA, 19 nt, Homo sapiens
cggaggguuugauguaccu

SEQ ID NO: 3399 - RNA, 19 nt, Homo sapiens
ggaggguuugauguaccug

SEQ ID NO: 3400 - RNA, 19 nt, Homo sapiens
gaggguuugauguaccugc

SEQ ID NO: 3401 - RNA, 19 nt, Homo sapiens
aggguuugauguaccugca

SEQ ID NO: 3402 - RNA, 19 nt, Homo sapiens
ggguuugauguaccugcag

SEQ ID NO: 3403 - RNA, 19 nt, Homo sapiens
gguuugauguaccugcagg

SEQ ID NO: 3404 - RNA, 19 nt, Homo sapiens
guuugauguaccugcagga

SEQ ID NO: 3405 - RNA, 19 nt, Homo sapiens
uuugauguaccugcaggaa

SEQ ID NO: 3406 - RNA, 19 nt, Homo sapiens
uugauguaccugcaggaaa

SEQ ID NO: 3407 - RNA, 19 nt, Homo sapiens
aaacagugcgaaggugucc

SEQ ID NO: 3408 - RNA, 19 nt, Homo sapiens
aacagugcgaagguguccg

SEQ ID NO: 3409 - RNA, 19 nt, Homo sapiens
acagugcgaagguguccgc

SEQ ID NO: 3410 - RNA, 19 nt, Homo sapiens
cagugcgaagguguccgcc

SEQ ID NO: 3411 - RNA, 19 nt, Homo sapiens
agugcgaagguguccgccc

SEQ ID NO: 3412 - RNA, 19 nt, Homo sapiens
gugcgaagguguccgccca

SEQ ID NO: 3413 - RNA, 19 nt, Homo sapiens
ugcgaagguguccgcccag

SEQ ID NO: 3414 - RNA, 19 nt, Homo sapiens
gcgaagguguccgcccagg

SEQ ID NO: 3415 - RNA, 19 nt, Homo sapiens
cgaagguguccgcccaggu

SEQ ID NO: 3416 - RNA, 19 nt, Homo sapiens
gaagguguccgcccaggug

SEQ ID NO: 3417 - RNA, 19 nt, Homo sapiens
aagguguccgcccaggugu

SEQ ID NO: 3418 - RNA, 19 nt, Homo sapiens
agguguccgcccagguguu

SEQ ID NO: 3419 - RNA, 19 nt, Homo sapiens
gguguccgcccagguguuu

SEQ ID NO: 3420 - RNA, 19 nt, Homo sapiens
guguccgcccagguguuuc

SEQ ID NO: 3421 - RNA, 19 nt, Homo sapiens
uguccgcccagguguuuca

SEQ ID NO: 3422 - RNA, 19 nt, Homo sapiens
guccgcccagguguuucag

SEQ ID NO: 3423 - RNA, 19 nt, Homo sapiens
uccgcccagguguuucagg

SEQ ID NO: 3424 - RNA, 19 nt, Homo sapiens
ccgcccagguguuucagga

SEQ ID NO: 3425 - RNA, 19 nt, Homo sapiens
cgcccagguguuucaggag

SEQ ID NO: 3426 - RNA, 19 nt, Homo sapiens
gcccagguguuucaggagu

SEQ ID NO: 3427 - RNA, 19 nt, Homo sapiens
cccagguguuucaggagug

SEQ ID NO: 3428 - RNA, 19 nt, Homo sapiens
ccagguguuucaggagugc

SEQ ID NO: 3429 - RNA, 19 nt, Homo sapiens
cagguguuucaggagugcg

SEQ ID NO: 3430 - RNA, 19 nt, Homo sapiens
agguguuucaggagugcgg

SEQ ID NO: 3431 - RNA, 19 nt, Homo sapiens
gguguuucaggagugcggc

SEQ ID NO: 3432 - RNA, 19 nt, Homo sapiens
guguuucaggagugcggcc

SEQ ID NO: 3433 - RNA, 19 nt, Homo sapiens
uguuucaggagugcggccc

SEQ ID NO: 3434 - RNA, 19 nt, Homo sapiens
cccgacccggugccugccc

SEQ ID NO: 3435 - RNA, 19 nt, Homo sapiens
ccgacccggugccugcccg

SEQ ID NO: 3436 - RNA, 19 nt, Homo sapiens
cgacccggugccugcccgc

SEQ ID NO: 3437 - RNA, 19 nt, Homo sapiens
gacccggugccugcccgca

SEQ ID NO: 3438 - RNA, 19 nt, Homo sapiens
acccggugccugcccgcaa

SEQ ID NO: 3439 - RNA, 19 nt, Homo sapiens
cccggugccugcccgcaac

SEQ ID NO: 3440 - RNA, 19 nt, Homo sapiens
ccggugccugcccgcaacc

SEQ ID NO: 3441 - RNA, 19 nt, Homo sapiens
cggugccugcccgcaaccg

SEQ ID NO: 3442 - RNA, 19 nt, Homo sapiens
ggugccugcccgcaaccgu

SEQ ID NO: 3443 - RNA, 19 nt, Homo sapiens
gugccugcccgcaaccguc

SEQ ID NO: 3444 - RNA, 19 nt, Homo sapiens
ugccugcccgcaaccgucg

SEQ ID NO: 3445 - RNA, 19 nt, Homo sapiens
gccugcccgcaaccgucga

SEQ ID NO: 3446 - RNA, 19 nt, Homo sapiens
ccugcccgcaaccgucgag

SEQ ID NO: 3447 - RNA, 19 nt, Homo sapiens
cugcccgcaaccgucgagc

SEQ ID NO: 3448 - RNA, 19 nt, Homo sapiens
ugcccgcaaccgucgagcc

SEQ ID NO: 3449 - RNA, 19 nt, Homo sapiens
gcccgcaaccgucgagccc

SEQ ID NO: 3450 - RNA, 19 nt, Homo sapiens
cccgggaagaggcgggccg

SEQ ID NO: 3451 - RNA, 19 nt, Homo sapiens
ccgggaagaggcgggccgg

SEQ ID NO: 3452 - RNA, 19 nt, Homo sapiens
cgggaagaggcgggccggc

SEQ ID NO: 3453 - RNA, 19 nt, Homo sapiens
gggaagaggcgggccggcu

SEQ ID NO: 3454 - RNA, 19 nt, Homo sapiens
ggaagaggcgggccggcug

SEQ ID NO: 3455 - RNA, 19 nt, Homo sapiens
gaagaggcgggccggcugu

SEQ ID NO: 3456 - RNA, 19 nt, Homo sapiens
aagaggcgggccggcugug

SEQ ID NO: 3457 - RNA, 19 nt, Homo sapiens
agaggcgggccggcugugg

SEQ ID NO: 3458 - RNA, 19 nt, Homo sapiens
gaggcgggccggcuguggu

SEQ ID NO: 3459 - RNA, 19 nt, Homo sapiens
aggcgggccggcugugguc

SEQ ID NO: 3460 - RNA, 19 nt, Homo sapiens
ggcgggccggcuguggucg

SEQ ID NO: 3461 - RNA, 19 nt, Homo sapiens
gcgggccggcuguggucga

SEQ ID NO: 3462 - RNA, 19 nt, Homo sapiens
cgggccggcuguggucgau

SEQ ID NO: 3463 - RNA, 19 nt, Homo sapiens
gggccggcuguggucgaug

SEQ ID NO: 3464 - RNA, 19 nt, Homo sapiens
ggccggcuguggucgaugg

SEQ ID NO: 3465 - RNA, 19 nt, Homo sapiens
gccggcuguggucgauggu

SEQ ID NO: 3466 - RNA, 19 nt, Homo sapiens
ccggcuguggucgauggug

SEQ ID NO: 3467 - RNA, 19 nt, Homo sapiens
cggcuguggucgaugguga

SEQ ID NO: 3468 - RNA, 19 nt, Homo sapiens
ggcuguggucgauggugac

SEQ ID NO: 3469 - RNA, 19 nt, Homo sapiens
gcuguggucgauggugacc

SEQ ID NO: 3470 - RNA, 19 nt, Homo sapiens
cuguggucgauggugaccg

SEQ ID NO: 3471 - RNA, 19 nt, Homo sapiens
uguggucgauggugaccga

SEQ ID NO: 3472 - RNA, 19 nt, Homo sapiens
guggucgauggugaccgag

SEQ ID NO: 3473 - RNA, 19 nt, Homo sapiens
uggucgauggugaccgagg

SEQ ID NO: 3474 - RNA, 19 nt, Homo sapiens
ggucgauggugaccgagga

SEQ ID NO: 3475 - RNA, 19 nt, Homo sapiens
gucgauggugaccgaggag

SEQ ID NO: 3476 - RNA, 19 nt, Homo sapiens
ucgauggugaccgaggagg

SEQ ID NO: 3477 - RNA, 19 nt, Homo sapiens
cgauggugaccgaggagga

SEQ ID NO: 3478 - RNA, 19 nt, Homo sapiens
gauggugaccgaggaggag

SEQ ID NO: 3479 - RNA, 19 nt, Homo sapiens
auggugaccgaggaggagc

SEQ ID NO: 3480 - RNA, 19 nt, Homo sapiens
uggugaccgaggaggagcg

SEQ ID NO: 3481 - RNA, 19 nt, Homo sapiens
ggugaccgaggaggagcgg

SEQ ID NO: 3482 - RNA, 19 nt, Homo sapiens
gugaccgaggaggagcggc

SEQ ID NO: 3483 - RNA, 19 nt, Homo sapiens
ugaccgaggaggagcggcc

SEQ ID NO: 3484 - RNA, 19 nt, Homo sapiens
gaccgaggaggagcggccc

SEQ ID NO: 3485 - RNA, 19 nt, Homo sapiens
accgaggaggagcggccca

SEQ ID NO: 3486 - RNA, 19 nt, Homo sapiens
ccgaggaggagcggcccac

SEQ ID NO: 3487 - RNA, 19 nt, Homo sapiens
cgaggaggagcggcccacg

SEQ ID NO: 3488 - RNA, 19 nt, Homo sapiens
gaggaggagcggcccacga

SEQ ID NO: 3489 - RNA, 19 nt, Homo sapiens
aggaggagcggcccacgac

SEQ ID NO: 3490 - RNA, 19 nt, Homo sapiens
ggaggagcggcccacgacg

SEQ ID NO: 3491 - RNA, 19 nt, Homo sapiens
gaggagcggcccacgacgg

SEQ ID NO: 3492 - RNA, 19 nt, Homo sapiens
aggagcggcccacgacggc

SEQ ID NO: 3493 - RNA, 19 nt, Homo sapiens
ggagcggcccacgacggcc

SEQ ID NO: 3494 - RNA, 19 nt, Homo sapiens
gagcggcccacgacggccg

SEQ ID NO: 3495 - RNA, 19 nt, Homo sapiens
agcggcccacgacggccgc

SEQ ID NO: 3496 - RNA, 19 nt, Homo sapiens
gcggcccacgacggccgca

SEQ ID NO: 3497 - RNA, 19 nt, Homo sapiens
cggcccacgacggccgcag

SEQ ID NO: 3498 - RNA, 19 nt, Homo sapiens
ggcccacgacggccgcagg

SEQ ID NO: 3499 - RNA, 19 nt, Homo sapiens
gcccacgacggccgcaggc

SEQ ID NO: 3500 - RNA, 19 nt, Homo sapiens
cccacgacggccgcaggca

SEQ ID NO: 3501 - RNA, 19 nt, Homo sapiens
ccacgacggccgcaggcac

SEQ ID NO: 3502 - RNA, 19 nt, Homo sapiens
cacgacggccgcaggcacc

SEQ ID NO: 3503 - RNA, 19 nt, Homo sapiens
acgacggccgcaggcacca

SEQ ID NO: 3504 - RNA, 19 nt, Homo sapiens
cgacggccgcaggcaccaa

SEQ ID NO: 3505 - RNA, 19 nt, Homo sapiens
gacggccgcaggcaccaac

SEQ ID NO: 3506 - RNA, 19 nt, Homo sapiens
acggccgcaggcaccaacc

SEQ ID NO: 3507 - RNA, 19 nt, Homo sapiens
cggccgcaggcaccaaccu

SEQ ID NO: 3508 - RNA, 19 nt, Homo sapiens
ggccgcaggcaccaaccug

SEQ ID NO: 3509 - RNA, 19 nt, Homo sapiens
gccgcaggcaccaaccugc

SEQ ID NO: 3510 - RNA, 19 nt, Homo sapiens
ccgcaggcaccaaccugca

SEQ ID NO: 3511 - RNA, 19 nt, Homo sapiens
cgcaggcaccaaccugcac

SEQ ID NO: 3512 - RNA, 19 nt, Homo sapiens
gcaggcaccaaccugcacc

SEQ ID NO: 3513 - RNA, 19 nt, Homo sapiens
caggcaccaaccugcaccg

SEQ ID NO: 3514 - RNA, 19 nt, Homo sapiens
aggcaccaaccugcaccgg

SEQ ID NO: 3515 - RNA, 19 nt, Homo sapiens
ggcaccaaccugcaccggc

SEQ ID NO: 3516 - RNA, 19 nt, Homo sapiens
gcaccaaccugcaccggcu

SEQ ID NO: 3517 - RNA, 19 nt, Homo sapiens
caccaaccugcaccggcug

SEQ ID NO: 3518 - RNA, 19 nt, Homo sapiens
accaaccugcaccggcugg

SEQ ID NO: 3519 - RNA, 19 nt, Homo sapiens
ccaaccugcaccggcuggu

SEQ ID NO: 3520 - RNA, 19 nt, Homo sapiens
caaccugcaccggcuggug

SEQ ID NO: 3521 - RNA, 19 nt, Homo sapiens
aaccugcaccggcuggugu

SEQ ID NO: 3522 - RNA, 19 nt, Homo sapiens
accugcaccggcuggugug

SEQ ID NO: 3523 - RNA, 19 nt, Homo sapiens
ccugcaccggcuggugugg

SEQ ID NO: 3524 - RNA, 19 nt, Homo sapiens
cugcaccggcugguguggg

SEQ ID NO: 3525 - RNA, 19 nt, Homo sapiens
ugcaccggcugguguggga

SEQ ID NO: 3526 - RNA, 19 nt, Homo sapiens
gcaccggcuggugugggag

SEQ ID NO: 3527 - RNA, 19 nt, Homo sapiens
caccggcuggugugggagc

SEQ ID NO: 3528 - RNA, 19 nt, Homo sapiens
accggcuggugugggagcu

SEQ ID NO: 3529 - RNA, 19 nt, Homo sapiens
ccggcuggugugggagcuc

SEQ ID NO: 3530 - RNA, 19 nt, Homo sapiens
cggcuggugugggagcucc

SEQ ID NO: 3531 - RNA, 19 nt, Homo sapiens
ggcuggugugggagcuccg

SEQ ID NO: 3532 - RNA, 19 nt, Homo sapiens
gcuggugugggagcuccgc

SEQ ID NO: 3533 - RNA, 19 nt, Homo sapiens
cuggugugggagcuccgcg

SEQ ID NO: 3534 - RNA, 19 nt, Homo sapiens
uggugugggagcuccgcga

SEQ ID NO: 3535 - RNA, 19 nt, Homo sapiens
ggugugggagcuccgcgag

SEQ ID NO: 3536 - RNA, 19 nt, Homo sapiens
gugugggagcuccgcgagc

SEQ ID NO: 3537 - RNA, 19 nt, Homo sapiens
ugugggagcuccgcgagcg

SEQ ID NO: 3538 - RNA, 19 nt, Homo sapiens
gugggagcuccgcgagcgu

SEQ ID NO: 3539 - RNA, 19 nt, Homo sapiens
ugggagcuccgcgagcguc

SEQ ID NO: 3540 - RNA, 19 nt, Homo sapiens
gggagcuccgcgagcgucu

SEQ ID NO: 3541 - RNA, 19 nt, Homo sapiens
ggagcuccgcgagcgucug

SEQ ID NO: 3542 - RNA, 19 nt, Homo sapiens
gagcuccgcgagcgucugg

SEQ ID NO: 3543 - RNA, 19 nt, Homo sapiens
gggcuucugggcccggcug

SEQ ID NO: 3544 - RNA, 19 nt, Homo sapiens
ggcuucugggcccggcugu

SEQ ID NO: 3545 - RNA, 19 nt, Homo sapiens
gcuucugggcccggcuguc

SEQ ID NO: 3546 - RNA, 19 nt, Homo sapiens
cuucugggcccggcugucc

SEQ ID NO: 3547 - RNA, 19 nt, Homo sapiens
uucugggcccggcuguccc

SEQ ID NO: 3548 - RNA, 19 nt, Homo sapiens
ucugggcccggcugucccu

SEQ ID NO: 3549 - RNA, 19 nt, Homo sapiens
cugggcccggcugucccug

SEQ ID NO: 3550 - RNA, 19 nt, Homo sapiens
ugggcccggcugucccuga

SEQ ID NO: 3551 - RNA, 19 nt, Homo sapiens
gggcccggcugucccugac

SEQ ID NO: 3552 - RNA, 19 nt, Homo sapiens
ggcccggcugucccugacg

SEQ ID NO: 3553 - RNA, 19 nt, Homo sapiens
gcccggcugucccugacgg

SEQ ID NO: 3554 - RNA, 19 nt, Homo sapiens
cccggcugucccugacggu

SEQ ID NO: 3555 - RNA, 19 nt, Homo sapiens
ccggcugucccugacggug

SEQ ID NO: 3556 - RNA, 19 nt, Homo sapiens
cggcugucccugacggugu

SEQ ID NO: 3557 - RNA, 19 nt, Homo sapiens
ggcugucccugacggugug

SEQ ID NO: 3558 - RNA, 19 nt, Homo sapiens
gcugucccugacggugugc

SEQ ID NO: 3559 - RNA, 19 nt, Homo sapiens
cugucccugacggugugcg

SEQ ID NO: 3560 - RNA, 19 nt, Homo sapiens
ugucccugacggugugcgg

SEQ ID NO: 3561 - RNA, 19 nt, Homo sapiens
gucccugacggugugcgga

SEQ ID NO: 3562 - RNA, 19 nt, Homo sapiens
ucccugacggugugcggag

SEQ ID NO: 3563 - RNA, 19 nt, Homo sapiens
cccugacggugugcggaga

SEQ ID NO: 3564 - RNA, 19 nt, Homo sapiens
ccugacggugugcggagac

SEQ ID NO: 3565 - RNA, 19 nt, Homo sapiens
cugacggugugcggagacu

SEQ ID NO: 3566 - RNA, 19 nt, Homo sapiens
ugacggugugcggagacuc

SEQ ID NO: 3567 - RNA, 19 nt, Homo sapiens
gacggugugcggagacucu

SEQ ID NO: 3568 - RNA, 19 nt, Homo sapiens
acggugugcggagacucuc

SEQ ID NO: 3569 - RNA, 19 nt, Homo sapiens
cggugugcggagacucucg

SEQ ID NO: 3570 - RNA, 19 nt, Homo sapiens
ggugugcggagacucucgc

SEQ ID NO: 3571 - RNA, 19 nt, Homo sapiens
gugugcggagacucucgca

SEQ ID NO: 3572 - RNA, 19 nt, Homo sapiens
ugugcggagacucucgcau

SEQ ID NO: 3573 - RNA, 19 nt, Homo sapiens
gugcggagacucucgcaug

SEQ ID NO: 3574 - RNA, 19 nt, Homo sapiens
ugcggagacucucgcaugg

SEQ ID NO: 3575 - RNA, 19 nt, Homo sapiens
ggcagcggacgccucgcug

SEQ ID NO: 3576 - RNA, 19 nt, Homo sapiens
gcagcggacgccucgcugg

SEQ ID NO: 3577 - RNA, 19 nt, Homo sapiens
cagcggacgccucgcugga

SEQ ID NO: 3578 - RNA, 19 nt, Homo sapiens
agcggacgccucgcuggag

SEQ ID NO: 3579 - RNA, 19 nt, Homo sapiens
gcggacgccucgcuggagg

SEQ ID NO: 3580 - RNA, 19 nt, Homo sapiens
cggacgccucgcuggaggc

SEQ ID NO: 3581 - RNA, 19 nt, Homo sapiens
ggacgccucgcuggaggcg

SEQ ID NO: 3582 - RNA, 19 nt, Homo sapiens
gacgccucgcuggaggcgg

SEQ ID NO: 3583 - RNA, 19 nt, Homo sapiens
acgccucgcuggaggcggc

SEQ ID NO: 3584 - RNA, 19 nt, Homo sapiens
cgccucgcuggaggcggcg

SEQ ID NO: 3585 - RNA, 19 nt, Homo sapiens
gccucgcuggaggcggcgc

SEQ ID NO: 3586 - RNA, 19 nt, Homo sapiens
ccucgcuggaggcggcgcc

SEQ ID NO: 3587 - RNA, 19 nt, Homo sapiens
cucgcuggaggcggcgccc

SEQ ID NO: 3588 - RNA, 19 nt, Homo sapiens
ucgcuggaggcggcgcccu

SEQ ID NO: 3589 - RNA, 19 nt, Homo sapiens
cgcuggaggcggcgcccug

SEQ ID NO: 3590 - RNA, 19 nt, Homo sapiens
gcuggaggcggcgcccugc

SEQ ID NO: 3591 - RNA, 19 nt, Homo sapiens
cuggaggcggcgcccugcu

SEQ ID NO: 3592 - RNA, 19 nt, Homo sapiens
uggaggcggcgcccugcug

SEQ ID NO: 3593 - RNA, 19 nt, Homo sapiens
ggaggcggcgcccugcugg

SEQ ID NO: 3594 - RNA, 19 nt, Homo sapiens
gaggcggcgcccugcugga

SEQ ID NO: 3595 - RNA, 19 nt, Homo sapiens
aggcggcgcccugcuggac

SEQ ID NO: 3596 - RNA, 19 nt, Homo sapiens
ggcggcgcccugcuggacc

SEQ ID NO: 3597 - RNA, 19 nt, Homo sapiens
gcggcgcccugcuggaccg

SEQ ID NO: 3598 - RNA, 19 nt, Homo sapiens
cggcgcccugcuggaccgg

SEQ ID NO: 3599 - RNA, 19 nt, Homo sapiens
ggcgcccugcuggaccgga

SEQ ID NO: 3600 - RNA, 19 nt, Homo sapiens
gcgcccugcuggaccggag

SEQ ID NO: 3601 - RNA, 19 nt, Homo sapiens
cgcccugcuggaccggagc

SEQ ID NO: 3602 - RNA, 19 nt, Homo sapiens
gcccugcuggaccggagcc

SEQ ID NO: 3603 - RNA, 19 nt, Homo sapiens
cccugcuggaccggagccg

SEQ ID NO: 3604 - RNA, 19 nt, Homo sapiens
ccugcuggaccggagccgg

SEQ ID NO: 3605 - RNA, 19 nt, Homo sapiens
cugcuggaccggagccggg

SEQ ID NO: 3606 - RNA, 19 nt, Homo sapiens
ugcuggaccggagccgggc

SEQ ID NO: 3607 - RNA, 19 nt, Homo sapiens
gcuggaccggagccgggcg

SEQ ID NO: 3608 - RNA, 19 nt, Homo sapiens
cuggaccggagccgggcgg

SEQ ID NO: 3609 - RNA, 19 nt, Homo sapiens
uggaccggagccgggcggg

SEQ ID NO: 3610 - RNA, 19 nt, Homo sapiens
cccggccgagcaggucaac

SEQ ID NO: 3611 - RNA, 19 nt, Homo sapiens
ccggccgagcaggucaaca

SEQ ID NO: 3612 - RNA, 19 nt, Homo sapiens
cggccgagcaggucaacaa

SEQ ID NO: 3613 - RNA, 19 nt, Homo sapiens
ggccgagcaggucaacaac

SEQ ID NO: 3614 - RNA, 19 nt, Homo sapiens
gccgagcaggucaacaacc

SEQ ID NO: 3615 - RNA, 19 nt, Homo sapiens
ccgagcaggucaacaaccc

SEQ ID NO: 3616 - RNA, 19 nt, Homo sapiens
cccgagcucaagguggacg

SEQ ID NO: 3617 - RNA, 19 nt, Homo sapiens
ccgagcucaagguggacgc

SEQ ID NO: 3618 - RNA, 19 nt, Homo sapiens
cgagcucaagguggacgcc

SEQ ID NO: 3619 - RNA, 19 nt, Homo sapiens
gagcucaagguggacgccu

SEQ ID NO: 3620 - RNA, 19 nt, Homo sapiens
agcucaagguggacgccuc

SEQ ID NO: 3621 - RNA, 19 nt, Homo sapiens
gcucaagguggacgccucg

SEQ ID NO: 3622 - RNA, 19 nt, Homo sapiens
cucaagguggacgccucgg

SEQ ID NO: 3623 - RNA, 19 nt, Homo sapiens
ucaagguggacgccucggg

SEQ ID NO: 3624 - RNA, 19 nt, Homo sapiens
caagguggacgccucgggc

SEQ ID NO: 3625 - RNA, 19 nt, Homo sapiens
aagguggacgccucgggcc

SEQ ID NO: 3626 - RNA, 19 nt, Homo sapiens
agguggacgccucgggccc

SEQ ID NO: 3627 - RNA, 19 nt, Homo sapiens
cccgaugucccgacacggc

SEQ ID NO: 3628 - RNA, 19 nt, Homo sapiens
ccgaugucccgacacggcg

SEQ ID NO: 3629 - RNA, 19 nt, Homo sapiens
cgaugucccgacacggcgg

SEQ ID NO: 3630 - RNA, 19 nt, Homo sapiens
gaugucccgacacggcggc

SEQ ID NO: 3631 - RNA, 19 nt, Homo sapiens
augucccgacacggcggcg

SEQ ID NO: 3632 - RNA, 19 nt, Homo sapiens
ugucccgacacggcggcgu

SEQ ID NO: 3633 - RNA, 19 nt, Homo sapiens
gucccgacacggcggcguc

SEQ ID NO: 3634 - RNA, 19 nt, Homo sapiens
ucccgacacggcggcgucg

SEQ ID NO: 3635 - RNA, 19 nt, Homo sapiens
cccgacacggcggcgucgg

SEQ ID NO: 3636 - RNA, 19 nt, Homo sapiens
ccgacacggcggcgucggc

SEQ ID NO: 3637 - RNA, 19 nt, Homo sapiens
cgacacggcggcgucggcu

SEQ ID NO: 3638 - RNA, 19 nt, Homo sapiens
gacacggcggcgucggcua

SEQ ID NO: 3639 - RNA, 19 nt, Homo sapiens
acacggcggcgucggcuac

SEQ ID NO: 3640 - RNA, 19 nt, Homo sapiens
cacggcggcgucggcuaca

SEQ ID NO: 3641 - RNA, 19 nt, Homo sapiens
acggcggcgucggcuacag

SEQ ID NO: 3642 - RNA, 19 nt, Homo sapiens
cggcggcgucggcuacagc

SEQ ID NO: 3643 - RNA, 19 nt, Homo sapiens
ggcggcgucggcuacagcu

SEQ ID NO: 3644 - RNA, 19 nt, Homo sapiens
gcggcgucggcuacagcuc

SEQ ID NO: 3645 - RNA, 19 nt, Homo sapiens
cggcgucggcuacagcucc

SEQ ID NO: 3646 - RNA, 19 nt, Homo sapiens
ggcgucggcuacagcuccg

SEQ ID NO: 3647 - RNA, 19 nt, Homo sapiens
gcgucggcuacagcuccgg

SEQ ID NO: 3648 - RNA, 19 nt, Homo sapiens
cgucggcuacagcuccggg

SEQ ID NO: 3649 - RNA, 19 nt, Homo sapiens
gucggcuacagcuccgggc

SEQ ID NO: 3650 - RNA, 19 nt, Homo sapiens
ucggcuacagcuccgggcg

SEQ ID NO: 3651 - RNA, 19 nt, Homo sapiens
cggcuacagcuccgggcgg

SEQ ID NO: 3652 - RNA, 19 nt, Homo sapiens
ggcuacagcuccgggcggc

SEQ ID NO: 3653 - RNA, 19 nt, Homo sapiens
gcuacagcuccgggcggcc

SEQ ID NO: 3654 - RNA, 19 nt, Homo sapiens
aaacggccgcacugggaca

SEQ ID NO: 3655 - RNA, 19 nt, Homo sapiens
aacggccgcacugggacac

SEQ ID NO: 3656 - RNA, 19 nt, Homo sapiens
acggccgcacugggacacg

SEQ ID NO: 3657 - RNA, 19 nt, Homo sapiens
cggccgcacugggacacga

SEQ ID NO: 3658 - RNA, 19 nt, Homo sapiens
ggccgcacugggacacgac

SEQ ID NO: 3659 - RNA, 19 nt, Homo sapiens
gccgcacugggacacgacc

SEQ ID NO: 3660 - RNA, 19 nt, Homo sapiens
ccgcacugggacacgaccu

SEQ ID NO: 3661 - RNA, 19 nt, Homo sapiens
cgcacugggacacgaccug

SEQ ID NO: 3662 - RNA, 19 nt, Homo sapiens
gcacugggacacgaccugg

SEQ ID NO: 3663 - RNA, 19 nt, Homo sapiens
cacugggacacgaccugga

SEQ ID NO: 3664 - RNA, 19 nt, Homo sapiens
acugggacacgaccuggac

SEQ ID NO: 3665 - RNA, 19 nt, Homo sapiens
cugggacacgaccuggacg

SEQ ID NO: 3666 - RNA, 19 nt, Homo sapiens
ugggacacgaccuggacgg

SEQ ID NO: 3667 - RNA, 19 nt, Homo sapiens
gggacacgaccuggacggg

SEQ ID NO: 3668 - RNA, 19 nt, Homo sapiens
ggacacgaccuggacgggc

SEQ ID NO: 3669 - RNA, 19 nt, Homo sapiens
gacacgaccuggacgggca

SEQ ID NO: 3670 - RNA, 19 nt, Homo sapiens
acacgaccuggacgggcag

SEQ ID NO: 3671 - RNA, 19 nt, Homo sapiens
cacgaccuggacgggcagg

SEQ ID NO: 3672 - RNA, 19 nt, Homo sapiens
acgaccuggacgggcagga

SEQ ID NO: 3673 - RNA, 19 nt, Homo sapiens
cgaccuggacgggcaggac

SEQ ID NO: 3674 - RNA, 19 nt, Homo sapiens
gaccuggacgggcaggacg

SEQ ID NO: 3675 - RNA, 19 nt, Homo sapiens
accuggacgggcaggacgc

SEQ ID NO: 3676 - RNA, 19 nt, Homo sapiens
ccuggacgggcaggacgcg

SEQ ID NO: 3677 - RNA, 19 nt, Homo sapiens
cuggacgggcaggacgcgg

SEQ ID NO: 3678 - RNA, 19 nt, Homo sapiens
uggacgggcaggacgcgga

SEQ ID NO: 3679 - RNA, 19 nt, Homo sapiens
ggacgggcaggacgcggau

SEQ ID NO: 3680 - RNA, 19 nt, Homo sapiens
gacgggcaggacgcggaug

SEQ ID NO: 3681 - RNA, 19 nt, Homo sapiens
acgggcaggacgcggauga

SEQ ID NO: 3682 - RNA, 19 nt, Homo sapiens
cgggcaggacgcggaugag

SEQ ID NO: 3683 - RNA, 19 nt, Homo sapiens
gggcaggacgcggaugagg

SEQ ID NO: 3684 - RNA, 19 nt, Homo sapiens
ggcaggacgcggaugagga

SEQ ID NO: 3685 - RNA, 19 nt, Homo sapiens
gcaggacgcggaugaggau

SEQ ID NO: 3686 - RNA, 19 nt, Homo sapiens
caggacgcggaugaggaug

SEQ ID NO: 3687 - RNA, 19 nt, Homo sapiens
aggacgcggaugaggaugc

SEQ ID NO: 3688 - RNA, 19 nt, Homo sapiens
ggacgcggaugaggaugcc

SEQ ID NO: 3689 - RNA, 19 nt, Homo sapiens
gggacagcaguaugcagau

SEQ ID NO: 3690 - RNA, 19 nt, Homo sapiens
ggacagcaguaugcagaug

SEQ ID NO: 3691 - RNA, 19 nt, Homo sapiens
gacagcaguaugcagauga

SEQ ID NO: 3692 - RNA, 19 nt, Homo sapiens
acagcaguaugcagaugac

SEQ ID NO: 3693 - RNA, 19 nt, Homo sapiens
cagcaguaugcagaugacu

SEQ ID NO: 3694 - RNA, 19 nt, Homo sapiens
agcaguaugcagaugacug

SEQ ID NO: 3695 - RNA, 19 nt, Homo sapiens
gcaguaugcagaugacugg

SEQ ID NO: 3696 - RNA, 19 nt, Homo sapiens
caguaugcagaugacugga

SEQ ID NO: 3697 - RNA, 19 nt, Homo sapiens
aguaugcagaugacuggau

SEQ ID NO: 3698 - RNA, 19 nt, Homo sapiens
guaugcagaugacuggaug

SEQ ID NO: 3699 - RNA, 19 nt, Homo sapiens
uaugcagaugacuggaugg

SEQ ID NO: 3700 - RNA, 19 nt, Homo sapiens
cccagcccggccuccucgg

SEQ ID NO: 3701 - RNA, 19 nt, Homo sapiens
ccagcccggccuccucggc

SEQ ID NO: 3702 - RNA, 19 nt, Homo sapiens
cagcccggccuccucggcc

SEQ ID NO: 3703 - RNA, 19 nt, Homo sapiens
agcccggccuccucggccu

SEQ ID NO: 3704 - RNA, 19 nt, Homo sapiens
gcccggccuccucggccuc

SEQ ID NO: 3705 - RNA, 19 nt, Homo sapiens
cccggccuccucggccucc

SEQ ID NO: 3706 - RNA, 19 nt, Homo sapiens
ccggccuccucggccucca

SEQ ID NO: 3707 - RNA, 19 nt, Homo sapiens
cggccuccucggccuccau

SEQ ID NO: 3708 - RNA, 19 nt, Homo sapiens
ggccuccucggccuccaua

SEQ ID NO: 3709 - RNA, 19 nt, Homo sapiens
gccuccucggccuccauac

SEQ ID NO: 3710 - RNA, 19 nt, Homo sapiens
ccuccucggccuccauacc

SEQ ID NO: 3711 - RNA, 19 nt, Homo sapiens
cuccucggccuccauaccc

SEQ ID NO: 3712 - RNA, 19 nt, Homo sapiens
uccucggccuccauacccu

SEQ ID NO: 3713 - RNA, 19 nt, Homo sapiens
ccucggccuccauacccuc

SEQ ID NO: 3714 - RNA, 19 nt, Homo sapiens
cucggccuccauacccucc

SEQ ID NO: 3715 - RNA, 19 nt, Homo sapiens
ucggccuccauacccuccu

SEQ ID NO: 3716 - RNA, 19 nt, Homo sapiens
cggccuccauacccuccua

SEQ ID NO: 3717 - RNA, 19 nt, Homo sapiens
ggccuccauacccuccuag

SEQ ID NO: 3718 - RNA, 19 nt, Homo sapiens
gccuccauacccuccuaga

SEQ ID NO: 3719 - RNA, 19 nt, Homo sapiens
ccuccauacccuccuagaa

SEQ ID NO: 3720 - RNA, 19 nt, Homo sapiens
cuccauacccuccuagaag

SEQ ID NO: 3721 - RNA, 19 nt, Homo sapiens
uccauacccuccuagaagg

SEQ ID NO: 3722 - RNA, 19 nt, Homo sapiens
ccauacccuccuagaaggg

SEQ ID NO: 3723 - RNA, 19 nt, Homo sapiens
cauacccuccuagaaggga

SEQ ID NO: 3724 - RNA, 19 nt, Homo sapiens
auacccuccuagaagggau

SEQ ID NO: 3725 - RNA, 19 nt, Homo sapiens
uacccuccuagaagggaug

SEQ ID NO: 3726 - RNA, 19 nt, Homo sapiens
acccuccuagaagggaugg

SEQ ID NO: 3727 - RNA, 19 nt, Homo sapiens
cccuccuagaagggauggu

SEQ ID NO: 3728 - RNA, 19 nt, Homo sapiens
ccuccuagaagggaugguu

SEQ ID NO: 3729 - RNA, 19 nt, Homo sapiens
cuccuagaagggaugguuc

SEQ ID NO: 3730 - RNA, 19 nt, Homo sapiens
uccuagaagggaugguucu

SEQ ID NO: 3731 - RNA, 19 nt, Homo sapiens
ccuagaagggaugguucug

SEQ ID NO: 3732 - RNA, 19 nt, Homo sapiens
cuagaagggaugguucugg

SEQ ID NO: 3733 - RNA, 19 nt, Homo sapiens
uagaagggaugguucuggg

SEQ ID NO: 3734 - RNA, 19 nt, Homo sapiens
ggcagugcccgcuacaacc

SEQ ID NO: 3735 - RNA, 19 nt, Homo sapiens
gcagugcccgcuacaacca

SEQ ID NO: 3736 - RNA, 19 nt, Homo sapiens
cagugcccgcuacaaccag

SEQ ID NO: 3737 - RNA, 19 nt, Homo sapiens
agugcccgcuacaaccagg

SEQ ID NO: 3738 - RNA, 19 nt, Homo sapiens
gugcccgcuacaaccaggg

SEQ ID NO: 3739 - RNA, 19 nt, Homo sapiens
ugcccgcuacaaccagggc

SEQ ID NO: 3740 - RNA, 19 nt, Homo sapiens
gcccgcuacaaccagggcc

SEQ ID NO: 3741 - RNA, 19 nt, Homo sapiens
cccgcuacaaccagggccg

SEQ ID NO: 3742 - RNA, 19 nt, Homo sapiens
ccgcuacaaccagggccgg

SEQ ID NO: 3743 - RNA, 19 nt, Homo sapiens
cgcuacaaccagggccgga

SEQ ID NO: 3744 - RNA, 19 nt, Homo sapiens
gcuacaaccagggccggag

SEQ ID NO: 3745 - RNA, 19 nt, Homo sapiens
cuacaaccagggccggagc

SEQ ID NO: 3746 - RNA, 19 nt, Homo sapiens
uacaaccagggccggagca

SEQ ID NO: 3747 - RNA, 19 nt, Homo sapiens
acaaccagggccggagcag

SEQ ID NO: 3748 - RNA, 19 nt, Homo sapiens
caaccagggccggagcagg

SEQ ID NO: 3749 - RNA, 19 nt, Homo sapiens
aaccagggccggagcagga

SEQ ID NO: 3750 - RNA, 19 nt, Homo sapiens
accagggccggagcaggag

SEQ ID NO: 3751 - RNA, 19 nt, Homo sapiens
ccagggccggagcaggagu

SEQ ID NO: 3752 - RNA, 19 nt, Homo sapiens
cagggccggagcaggagug

SEQ ID NO: 3753 - RNA, 19 nt, Homo sapiens
agggccggagcaggagugg

SEQ ID NO: 3754 - RNA, 19 nt, Homo sapiens
gggccggagcaggaguggg

SEQ ID NO: 3755 - RNA, 19 nt, Homo sapiens
uuucacacccaaaccaucc

SEQ ID NO: 3756 - RNA, 19 nt, Homo sapiens
uucacacccaaaccauccu

SEQ ID NO: 3757 - RNA, 19 nt, Homo sapiens
ucacacccaaaccauccuc

SEQ ID NO: 3758 - RNA, 19 nt, Homo sapiens
cacacccaaaccauccuca

SEQ ID NO: 3759 - RNA, 19 nt, Homo sapiens
acacccaaaccauccucau

SEQ ID NO: 3760 - RNA, 19 nt, Homo sapiens
cacccaaaccauccucauu

SEQ ID NO: 3761 - RNA, 19 nt, Homo sapiens
acccaaaccauccucauuc

SEQ ID NO: 3762 - RNA, 19 nt, Homo sapiens
cccaaaccauccucauucu

SEQ ID NO: 3763 - RNA, 19 nt, Homo sapiens
ccaaaccauccucauucuc

SEQ ID NO: 3764 - RNA, 19 nt, Homo sapiens
caaaccauccucauucucu

SEQ ID NO: 3765 - RNA, 19 nt, Homo sapiens
aaaccauccucauucucuc

SEQ ID NO: 3766 - RNA, 19 nt, Homo sapiens
aaccauccucauucucucc

SEQ ID NO: 3767 - RNA, 19 nt, Homo sapiens
accauccucauucucuccc

SEQ ID NO: 3768 - RNA, 19 nt, Homo sapiens
ccauccucauucucucccu

SEQ ID NO: 3769 - RNA, 19 nt, Homo sapiens
cauccucauucucucccuc

SEQ ID NO: 3770 - RNA, 19 nt, Homo sapiens
auccucauucucucccucu

SEQ ID NO: 3771 - RNA, 19 nt, Homo sapiens
uccucauucucucccucuc

SEQ ID NO: 3772 - RNA, 19 nt, Homo sapiens
ccucauucucucccucuca

SEQ ID NO: 3773 - RNA, 19 nt, Homo sapiens
cucauucucucccucucag

SEQ ID NO: 3774 - RNA, 19 nt, Homo sapiens
ucauucucucccucucagc

SEQ ID NO: 3775 - RNA, 19 nt, Homo sapiens
cauucucucccucucagcc

SEQ ID NO: 3776 - RNA, 19 nt, Homo sapiens
auucucucccucucagccc

SEQ ID NO: 3777 - RNA, 19 nt, Homo sapiens
uucucucccucucagcccu

SEQ ID NO: 3778 - RNA, 19 nt, Homo sapiens
ucucucccucucagcccug

SEQ ID NO: 3779 - RNA, 19 nt, Homo sapiens
cucucccucucagcccugg

SEQ ID NO: 3780 - RNA, 19 nt, Homo sapiens
ggcccugcuuggaccucga

SEQ ID NO: 3781 - RNA, 19 nt, Homo sapiens
gcccugcuuggaccucgau

SEQ ID NO: 3782 - RNA, 19 nt, Homo sapiens
cccugcuuggaccucgaua

SEQ ID NO: 3783 - RNA, 19 nt, Homo sapiens
ccugcuuggaccucgauaa

SEQ ID NO: 3784 - RNA, 19 nt, Homo sapiens
cugcuuggaccucgauaac

SEQ ID NO: 3785 - RNA, 19 nt, Homo sapiens
ugcuuggaccucgauaacg

SEQ ID NO: 3786 - RNA, 19 nt, Homo sapiens
gcuuggaccucgauaacgg

SEQ ID NO: 3787 - RNA, 19 nt, Homo sapiens
cuuggaccucgauaacggg

SEQ ID NO: 3788 - RNA, 19 nt, Homo sapiens
gggugcccuagcaucagaa

SEQ ID NO: 3789 - RNA, 19 nt, Homo sapiens
ggugcccuagcaucagaag

SEQ ID NO: 3790 - RNA, 19 nt, Homo sapiens
gugcccuagcaucagaagg

SEQ ID NO: 3791 - RNA, 19 nt, Homo sapiens
ugcccuagcaucagaaggg

SEQ ID NO: 3792 - RNA, 19 nt, Homo sapiens
gcccuagcaucagaagggu

SEQ ID NO: 3793 - RNA, 19 nt, Homo sapiens
cccuagcaucagaaggguu

SEQ ID NO: 3794 - RNA, 19 nt, Homo sapiens
ccuagcaucagaaggguuc

SEQ ID NO: 3795 - RNA, 19 nt, Homo sapiens
cuagcaucagaaggguuca

SEQ ID NO: 3796 - RNA, 19 nt, Homo sapiens
uagcaucagaaggguucau

SEQ ID NO: 3797 - RNA, 19 nt, Homo sapiens
agcaucagaaggguucaug

SEQ ID NO: 3798 - RNA, 19 nt, Homo sapiens
gcaucagaaggguucaugg

SEQ ID NO: 3799 - RNA, 19 nt, Homo sapiens
gggcugcagagaggguaga

SEQ ID NO: 3800 - RNA, 19 nt, Homo sapiens
ggcugcagagaggguagag

SEQ ID NO: 3801 - RNA, 19 nt, Homo sapiens
gcugcagagaggguagaga

SEQ ID NO: 3802 - RNA, 19 nt, Homo sapiens
cugcagagaggguagagaa

SEQ ID NO: 3803 - RNA, 19 nt, Homo sapiens
ugcagagaggguagagaag

SEQ ID NO: 3804 - RNA, 19 nt, Homo sapiens
gcagagaggguagagaagg

SEQ ID NO: 3805 - RNA, 19 nt, Homo sapiens
cagagaggguagagaaggg

SEQ ID NO: 3806 - RNA, 19 nt, Homo sapiens
agagaggguagagaaggga

SEQ ID NO: 3807 - RNA, 19 nt, Homo sapiens
gagaggguagagaagggac

SEQ ID NO: 3808 - RNA, 19 nt, Homo sapiens
agaggguagagaagggacu

SEQ ID NO: 3809 - RNA, 19 nt, Homo sapiens
gaggguagagaagggacuu

SEQ ID NO: 3810 - RNA, 19 nt, Homo sapiens
aggguagagaagggacuuu

SEQ ID NO: 3811 - RNA, 19 nt, Homo sapiens
ggguagagaagggacuuug

SEQ ID NO: 3812 - RNA, 19 nt, Homo sapiens
gguagagaagggacuuugc

SEQ ID NO: 3813 - RNA, 19 nt, Homo sapiens
guagagaagggacuuugca

SEQ ID NO: 3814 - RNA, 19 nt, Homo sapiens
uagagaagggacuuugcag

SEQ ID NO: 3815 - RNA, 19 nt, Homo sapiens
agagaagggacuuugcagg

SEQ ID NO: 3816 - RNA, 19 nt, Homo sapiens
gagaagggacuuugcaggu

SEQ ID NO: 3817 - RNA, 19 nt, Homo sapiens
agaagggacuuugcaggug

SEQ ID NO: 3818 - RNA, 19 nt, Homo sapiens
gaagggacuuugcagguga

SEQ ID NO: 3819 - RNA, 19 nt, Homo sapiens
aagggacuuugcaggugaa

SEQ ID NO: 3820 - RNA, 19 nt, Homo sapiens
agggacuuugcaggugaau

SEQ ID NO: 3821 - RNA, 19 nt, Homo sapiens
gggacuuugcaggugaaug

SEQ ID NO: 3822 - RNA, 19 nt, Homo sapiens
ggacuuugcaggugaaugg

SEQ ID NO: 3823 - RNA, 19 nt, Homo sapiens
uuucaucagaggugggugg

SEQ ID NO: 3824 - RNA, 19 nt, Homo sapiens
uucaucagagguggguggg

SEQ ID NO: 3825 - RNA, 19 nt, Homo sapiens
ucaucagaggugggugggu

SEQ ID NO: 3826 - RNA, 19 nt, Homo sapiens
caucagaggugggugggug

SEQ ID NO: 3827 - RNA, 19 nt, Homo sapiens
aucagaggugggugggugu

SEQ ID NO: 3828 - RNA, 19 nt, Homo sapiens
ucagagguggguggguguu

SEQ ID NO: 3829 - RNA, 19 nt, Homo sapiens
cagagguggguggguguuc

SEQ ID NO: 3830 - RNA, 19 nt, Homo sapiens
agagguggguggguguuca

SEQ ID NO: 3831 - RNA, 19 nt, Homo sapiens
gagguggguggguguucac

SEQ ID NO: 3832 - RNA, 19 nt, Homo sapiens
agguggguggguguucaca

SEQ ID NO: 3833 - RNA, 19 nt, Homo sapiens
gguggguggguguucacaa

SEQ ID NO: 3834 - RNA, 19 nt, Homo sapiens
guggguggguguucacaau

SEQ ID NO: 3835 - RNA, 19 nt, Homo sapiens
uggguggguguucacaaua

SEQ ID NO: 3836 - RNA, 19 nt, Homo sapiens
ggguggguguucacaauau

SEQ ID NO: 3837 - RNA, 19 nt, Homo sapiens
gguggguguucacaauauu

SEQ ID NO: 3838 - RNA, 19 nt, Homo sapiens
guggguguucacaauauuu

SEQ ID NO: 3839 - RNA, 19 nt, Homo sapiens
uggguguucacaauauuua

SEQ ID NO: 3840 - RNA, 19 nt, Homo sapiens
ggguguucacaauauuuau

SEQ ID NO: 3841 - RNA, 19 nt, Homo sapiens
gguguucacaauauuuauu

SEQ ID NO: 3842 - RNA, 19 nt, Homo sapiens
guguucacaauauuuauuu

SEQ ID NO: 3843 - RNA, 19 nt, Homo sapiens
uuucauuugguaaugggag

SEQ ID NO: 3844 - RNA, 19 nt, Homo sapiens
uucauuugguaaugggagg

SEQ ID NO: 3845 - RNA, 19 nt, Homo sapiens
ucauuugguaaugggaggg

SEQ ID NO: 3846 - RNA, 19 nt, Homo sapiens
ggguauuuauuuaggaggg

SEQ ID NO: 3847 - RNA, 19 nt, Homo sapiens
gguauuuauuuaggaggga

SEQ ID NO: 3848 - RNA, 19 nt, Homo sapiens
guauuuauuuaggagggag

SEQ ID NO: 3849 - RNA, 19 nt, Homo sapiens
uauuuauuuaggagggagu

SEQ ID NO: 3850 - RNA, 19 nt, Homo sapiens
auuuauuuaggagggagug

SEQ ID NO: 3851 - RNA, 19 nt, Homo sapiens
uuuauuuaggagggagugu

SEQ ID NO: 3852 - RNA, 19 nt, Homo sapiens
uuauuuaggagggagugug

SEQ ID NO: 3853 - RNA, 19 nt, Homo sapiens
uauuuaggagggagugugg

SEQ ID NO: 3854 - RNA, 19 nt, Homo sapiens
auuuaggagggaguguggu

SEQ ID NO: 3855 - RNA, 19 nt, Homo sapiens
uuuaggagggagugugguu

SEQ ID NO: 3856 - RNA, 19 nt, Homo sapiens
uuaggagggagugugguuu

SEQ ID NO: 3857 - RNA, 19 nt, Homo sapiens
uaggagggagugugguuuc

SEQ ID NO: 3858 - RNA, 19 nt, Homo sapiens
aggagggagugugguuucc

SEQ ID NO: 3859 - RNA, 19 nt, Homo sapiens
ggagggagugugguuuccu

SEQ ID NO: 3860 - RNA, 19 nt, Homo sapiens
gagggagugugguuuccuu

SEQ ID NO: 3861 - RNA, 19 nt, Homo sapiens
agggagugugguuuccuua

SEQ ID NO: 3862 - RNA, 19 nt, Homo sapiens
gggagugugguuuccuuag

SEQ ID NO: 3863 - RNA, 19 nt, Homo sapiens
ggagugugguuuccuuaga

SEQ ID NO: 3864 - RNA, 19 nt, Homo sapiens
gagugugguuuccuuagaa

SEQ ID NO: 3865 - RNA, 19 nt, Homo sapiens
agugugguuuccuuagaag

SEQ ID NO: 3866 - RNA, 19 nt, Homo sapiens
gugugguuuccuuagaagg

SEQ ID NO: 3867 - RNA, 19 nt, Homo sapiens
ugugguuuccuuagaaggu

SEQ ID NO: 3868 - RNA, 19 nt, Homo sapiens
gugguuuccuuagaaggua

SEQ ID NO: 3869 - RNA, 19 nt, Homo sapiens
ugguuuccuuagaagguau

SEQ ID NO: 3870 - RNA, 19 nt, Homo sapiens
gguuuccuuagaagguaua

SEQ ID NO: 3871 - RNA, 19 nt, Homo sapiens
guuuccuuagaagguauag

SEQ ID NO: 3872 - RNA, 19 nt, Homo sapiens
uuuccuuagaagguauagu

SEQ ID NO: 3873 - RNA, 19 nt, Homo sapiens
uuccuuagaagguauaguc

SEQ ID NO: 3874 - RNA, 19 nt, Homo sapiens
uccuuagaagguauagucu

SEQ ID NO: 3875 - RNA, 19 nt, Homo sapiens
ccuuagaagguauagucuc

SEQ ID NO: 3876 - RNA, 19 nt, Homo sapiens
cuuagaagguauagucucu

SEQ ID NO: 3877 - RNA, 19 nt, Homo sapiens
uuagaagguauagucucua

SEQ ID NO: 3878 - RNA, 19 nt, Homo sapiens
uagaagguauagucucuag

SEQ ID NO: 3879 - RNA, 19 nt, Homo sapiens
agaagguauagucucuagc

SEQ ID NO: 3880 - RNA, 19 nt, Homo sapiens
gaagguauagucucuagcc

SEQ ID NO: 3881 - RNA, 19 nt, Homo sapiens
aagguauagucucuagccc

SEQ ID NO: 3882 - RNA, 19 nt, Homo sapiens
agguauagucucuagcccu

SEQ ID NO: 3883 - RNA, 19 nt, Homo sapiens
gguauagucucuagcccuc

SEQ ID NO: 3884 - RNA, 19 nt, Homo sapiens
guauagucucuagcccucu

SEQ ID NO: 3885 - RNA, 19 nt, Homo sapiens
uauagucucuagcccucua

SEQ ID NO: 3886 - RNA, 19 nt, Homo sapiens
auagucucuagcccucuaa

SEQ ID NO: 3887 - RNA, 19 nt, Homo sapiens
uagucucuagcccucuaag

SEQ ID NO: 3888 - RNA, 19 nt, Homo sapiens
agucucuagcccucuaagg

SEQ ID NO: 3889 - RNA, 19 nt, Homo sapiens
gucucuagcccucuaaggc

SEQ ID NO: 3890 - RNA, 19 nt, Homo sapiens
ucucuagcccucuaaggcu

SEQ ID NO: 3891 - RNA, 19 nt, Homo sapiens
cucuagcccucuaaggcug

SEQ ID NO: 3892 - RNA, 19 nt, Homo sapiens
ucuagcccucuaaggcugg

SEQ ID NO: 3893 - RNA, 19 nt, Homo sapiens
cuagcccucuaaggcuggg

SEQ ID NO: 3894 - RNA, 19 nt, Homo sapiens
aaaugaggaguuuagaguu

SEQ ID NO: 3895 - RNA, 19 nt, Homo sapiens
aaugaggaguuuagaguug

SEQ ID NO: 3896 - RNA, 19 nt, Homo sapiens
augaggaguuuagaguugc

SEQ ID NO: 3897 - RNA, 19 nt, Homo sapiens
ugaggaguuuagaguugca

SEQ ID NO: 3898 - RNA, 19 nt, Homo sapiens
gaggaguuuagaguugcag

SEQ ID NO: 3899 - RNA, 19 nt, Homo sapiens
aggaguuuagaguugcagc

SEQ ID NO: 3900 - RNA, 19 nt, Homo sapiens
ggaguuuagaguugcagcu

SEQ ID NO: 3901 - RNA, 19 nt, Homo sapiens
gaguuuagaguugcagcug

SEQ ID NO: 3902 - RNA, 19 nt, Homo sapiens
aguuuagaguugcagcugg

SEQ ID NO: 3903 - RNA, 19 nt, Homo sapiens
guuuagaguugcagcuggg

SEQ ID NO: 3904 - RNA, 19 nt, Homo sapiens
ggguuugaaggaaguugga

SEQ ID NO: 3905 - RNA, 19 nt, Homo sapiens
gguuugaaggaaguuggaa

SEQ ID NO: 3906 - RNA, 19 nt, Homo sapiens
guuugaaggaaguuggaag

SEQ ID NO: 3907 - RNA, 19 nt, Homo sapiens
uuugaaggaaguuggaagu

SEQ ID NO: 3908 - RNA, 19 nt, Homo sapiens
uugaaggaaguuggaagug

SEQ ID NO: 3909 - RNA, 19 nt, Homo sapiens
ugaaggaaguuggaagugg

SEQ ID NO: 3910 - RNA, 19 nt, Homo sapiens
gaaggaaguuggaaguggg

SEQ ID NO: 3911 - RNA, 19 nt, Homo sapiens
gggcaucuggucucagaaa

SEQ ID NO: 3912 - RNA, 19 nt, Homo sapiens
ggcaucuggucucagaaau

SEQ ID NO: 3913 - RNA, 19 nt, Homo sapiens
gcaucuggucucagaaaug

SEQ ID NO: 3914 - RNA, 19 nt, Homo sapiens
caucuggucucagaaaugg

SEQ ID NO: 3915 - RNA, 19 nt, Homo sapiens
aucuggucucagaaaugga

SEQ ID NO: 3916 - RNA, 19 nt, Homo sapiens
ucuggucucagaaauggac

SEQ ID NO: 3917 - RNA, 19 nt, Homo sapiens
cuggucucagaaauggacc

SEQ ID NO: 3918 - RNA, 19 nt, Homo sapiens
uggucucagaaauggacca

SEQ ID NO: 3919 - RNA, 19 nt, Homo sapiens
ggucucagaaauggaccag

SEQ ID NO: 3920 - RNA, 19 nt, Homo sapiens
gucucagaaauggaccagc

SEQ ID NO: 3921 - RNA, 19 nt, Homo sapiens
ucucagaaauggaccagcu

SEQ ID NO: 3922 - RNA, 19 nt, Homo sapiens
cucagaaauggaccagcug

SEQ ID NO: 3923 - RNA, 19 nt, Homo sapiens
ucagaaauggaccagcugg

SEQ ID NO: 3924 - RNA, 19 nt, Homo sapiens
cagaaauggaccagcugga

SEQ ID NO: 3925 - RNA, 19 nt, Homo sapiens
agaaauggaccagcuggau

SEQ ID NO: 3926 - RNA, 19 nt, Homo sapiens
gaaauggaccagcuggaug

SEQ ID NO: 3927 - RNA, 19 nt, Homo sapiens
aaauggaccagcuggaugc

SEQ ID NO: 3928 - RNA, 19 nt, Homo sapiens
aauggaccagcuggaugca

SEQ ID NO: 3929 - RNA, 19 nt, Homo sapiens
auggaccagcuggaugcag

SEQ ID NO: 3930 - RNA, 19 nt, Homo sapiens
uggaccagcuggaugcagg

SEQ ID NO: 3931 - RNA, 19 nt, Homo sapiens
ggaccagcuggaugcaggg

SEQ ID NO: 3932 - RNA, 19 nt, Homo sapiens
gaccagcuggaugcagggc

SEQ ID NO: 3933 - RNA, 19 nt, Homo sapiens
accagcuggaugcagggca

SEQ ID NO: 3934 - RNA, 19 nt, Homo sapiens
ccagcuggaugcagggcag

SEQ ID NO: 3935 - RNA, 19 nt, Homo sapiens
cagcuggaugcagggcagg

SEQ ID NO: 3936 - RNA, 19 nt, Homo sapiens
agcuggaugcagggcaggg

SEQ ID NO: 3937 - RNA, 19 nt, Homo sapiens
gggacugagggugcuugag

SEQ ID NO: 3938 - RNA, 19 nt, Homo sapiens
ggacugagggugcuugagu

SEQ ID NO: 3939 - RNA, 19 nt, Homo sapiens
gacugagggugcuugagua

SEQ ID NO: 3940 - RNA, 19 nt, Homo sapiens
acugagggugcuugaguag

SEQ ID NO: 3941 - RNA, 19 nt, Homo sapiens
cugagggugcuugaguagg

SEQ ID NO: 3942 - RNA, 19 nt, Homo sapiens
ugagggugcuugaguagga

SEQ ID NO: 3943 - RNA, 19 nt, Homo sapiens
gagggugcuugaguaggau

SEQ ID NO: 3944 - RNA, 19 nt, Homo sapiens
agggugcuugaguaggaug

SEQ ID NO: 3945 - RNA, 19 nt, Homo sapiens
gggugcuugaguaggaugu

SEQ ID NO: 3946 - RNA, 19 nt, Homo sapiens
ggugcuugaguaggaugug

SEQ ID NO: 3947 - RNA, 19 nt, Homo sapiens
gugcuugaguaggauguga

SEQ ID NO: 3948 - RNA, 19 nt, Homo sapiens
ugcuugaguaggaugugag

SEQ ID NO: 3949 - RNA, 19 nt, Homo sapiens
gcuugaguaggaugugaga

SEQ ID NO: 3950 - RNA, 19 nt, Homo sapiens
cuugaguaggaugugagac

SEQ ID NO: 3951 - RNA, 19 nt, Homo sapiens
uugaguaggaugugagacu

SEQ ID NO: 3952 - RNA, 19 nt, Homo sapiens
ugaguaggaugugagacuu

SEQ ID NO: 3953 - RNA, 19 nt, Homo sapiens
gaguaggaugugagacuuc

SEQ ID NO: 3954 - RNA, 19 nt, Homo sapiens
aguaggaugugagacuuca

SEQ ID NO: 3955 - RNA, 19 nt, Homo sapiens
guaggaugugagacuucau

SEQ ID NO: 3956 - RNA, 19 nt, Homo sapiens
uaggaugugagacuucaug

SEQ ID NO: 3957 - RNA, 19 nt, Homo sapiens
aggaugugagacuucaugg

SEQ ID NO: 3958 - RNA, 19 nt, Homo sapiens
ggaugugagacuucauggg

SEQ ID NO: 3959 - RNA, 19 nt, Homo sapiens
gaugugagacuucaugggc

SEQ ID NO: 3960 - RNA, 19 nt, Homo sapiens
augugagacuucaugggcc

SEQ ID NO: 3961 - RNA, 19 nt, Homo sapiens
ugugagacuucaugggccu

SEQ ID NO: 3962 - RNA, 19 nt, Homo sapiens
gugagacuucaugggccug

SEQ ID NO: 3963 - RNA, 19 nt, Homo sapiens
ugagacuucaugggccugg

SEQ ID NO: 3964 - RNA, 19 nt, Homo sapiens
gagacuucaugggccuggg

SEQ ID NO: 3965 - RNA, 19 nt, Homo sapiens
agacuucaugggccugggu

SEQ ID NO: 3966 - RNA, 19 nt, Homo sapiens
gacuucaugggccuggguu

SEQ ID NO: 3967 - RNA, 19 nt, Homo sapiens
acuucaugggccuggguuc

SEQ ID NO: 3968 - RNA, 19 nt, Homo sapiens
cuucaugggccuggguucu

SEQ ID NO: 3969 - RNA, 19 nt, Homo sapiens
uucaugggccuggguucug

SEQ ID NO: 3970 - RNA, 19 nt, Homo sapiens
ucaugggccuggguucugu

SEQ ID NO: 3971 - RNA, 19 nt, Homo sapiens
caugggccuggguucuguu

SEQ ID NO: 3972 - RNA, 19 nt, Homo sapiens
augggccuggguucuguug

SEQ ID NO: 3973 - RNA, 19 nt, Homo sapiens
ugggccuggguucuguuga

SEQ ID NO: 3974 - RNA, 19 nt, Homo sapiens
gggccuggguucuguugag

SEQ ID NO: 3975 - RNA, 19 nt, Homo sapiens
ggccuggguucuguugagu

SEQ ID NO: 3976 - RNA, 19 nt, Homo sapiens
gccuggguucuguugaguu

SEQ ID NO: 3977 - RNA, 19 nt, Homo sapiens
ccuggguucuguugaguuu

SEQ ID NO: 3978 - RNA, 19 nt, Homo sapiens
uuucaguaucaauuucuua

SEQ ID NO: 3979 - RNA, 19 nt, Homo sapiens
uucaguaucaauuucuuaa

SEQ ID NO: 3980 - RNA, 19 nt, Homo sapiens
ucaguaucaauuucuuaaa

SEQ ID NO: 3981 - RNA, 19 nt, Homo sapiens
caguaucaauuucuuaaac

SEQ ID NO: 3982 - RNA, 19 nt, Homo sapiens
aguaucaauuucuuaaacc

SEQ ID NO: 3983 - RNA, 19 nt, Homo sapiens
guaucaauuucuuaaacca

SEQ ID NO: 3984 - RNA, 19 nt, Homo sapiens
uaucaauuucuuaaaccaa

SEQ ID NO: 3985 - RNA, 19 nt, Homo sapiens
aucaauuucuuaaaccaaa

SEQ ID NO: 3986 - RNA, 19 nt, Homo sapiens
ucaauuucuuaaaccaaau

SEQ ID NO: 3987 - RNA, 19 nt, Homo sapiens
caauuucuuaaaccaaauu

SEQ ID NO: 3988 - RNA, 19 nt, Homo sapiens
aauuucuuaaaccaaauuu

SEQ ID NO: 3989 - RNA, 19 nt, Homo sapiens
gggugcucaucucgugacc

SEQ ID NO: 3990 - RNA, 19 nt, Homo sapiens
ggugcucaucucgugaccu

SEQ ID NO: 3991 - RNA, 19 nt, Homo sapiens
gugcucaucucgugaccuc

SEQ ID NO: 3992 - RNA, 19 nt, Homo sapiens
ugcucaucucgugaccucu

SEQ ID NO: 3993 - RNA, 19 nt, Homo sapiens
gcucaucucgugaccucug

SEQ ID NO: 3994 - RNA, 19 nt, Homo sapiens
cucaucucgugaccucugc

SEQ ID NO: 3995 - RNA, 19 nt, Homo sapiens
ucaucucgugaccucugcc

SEQ ID NO: 3996 - RNA, 19 nt, Homo sapiens
ccacccacauccuucacaa

SEQ ID NO: 3997 - RNA, 19 nt, Homo sapiens
cacccacauccuucacaaa

SEQ ID NO: 3998 - RNA, 19 nt, Homo sapiens
acccacauccuucacaaac

SEQ ID NO: 3999 - RNA, 19 nt, Homo sapiens
cccacauccuucacaaacu

SEQ ID NO: 4000 - RNA, 19 nt, Homo sapiens
ccacauccuucacaaacuc

SEQ ID NO: 4001 - RNA, 19 nt, Homo sapiens
cacauccuucacaaacucc

SEQ ID NO: 4002 - RNA, 19 nt, Homo sapiens
acauccuucacaaacucca

SEQ ID NO: 4003 - RNA, 19 nt, Homo sapiens
cauccuucacaaacuccau

SEQ ID NO: 4004 - RNA, 19 nt, Homo sapiens
auccuucacaaacuccaug

SEQ ID NO: 4005 - RNA, 19 nt, Homo sapiens
uccuucacaaacuccaugu

SEQ ID NO: 4006 - RNA, 19 nt, Homo sapiens
ccuucacaaacuccauguu

SEQ ID NO: 4007 - RNA, 19 nt, Homo sapiens
cuucacaaacuccauguuu

SEQ ID NO: 4008 - RNA, 19 nt, Homo sapiens
uucacaaacuccauguuuc

SEQ ID NO: 4009 - RNA, 19 nt, Homo sapiens
ucacaaacuccauguuuca

SEQ ID NO: 4010 - RNA, 19 nt, Homo sapiens
cacaaacuccauguuucag

SEQ ID NO: 4011 - RNA, 19 nt, Homo sapiens
acaaacuccauguuucagu

SEQ ID NO: 4012 - RNA, 19 nt, Homo sapiens
caaacuccauguuucagug

SEQ ID NO: 4013 - RNA, 19 nt, Homo sapiens
aaacuccauguuucagugu

SEQ ID NO: 4014 - RNA, 19 nt, Homo sapiens
aacuccauguuucaguguu

SEQ ID NO: 4015 - RNA, 19 nt, Homo sapiens
acuccauguuucaguguuu

SEQ ID NO: 4016 - RNA, 19 nt, Homo sapiens
cuccauguuucaguguuug

SEQ ID NO: 4017 - RNA, 19 nt, Homo sapiens
uccauguuucaguguuuga

SEQ ID NO: 4018 - RNA, 19 nt, Homo sapiens
ccauguuucaguguuugag

SEQ ID NO: 4019 - RNA, 19 nt, Homo sapiens
cauguuucaguguuugagu

SEQ ID NO: 4020 - RNA, 19 nt, Homo sapiens
auguuucaguguuugaguc

SEQ ID NO: 4021 - RNA, 19 nt, Homo sapiens
uguuucaguguuugagucc

SEQ ID NO: 4022 - RNA, 19 nt, Homo sapiens
guuucaguguuugagucca

SEQ ID NO: 4023 - RNA, 19 nt, Homo sapiens
uuucaguguuugaguccau

SEQ ID NO: 4024 - RNA, 19 nt, Homo sapiens
uucaguguuugaguccaug

SEQ ID NO: 4025 - RNA, 19 nt, Homo sapiens
ucaguguuugaguccaugu

SEQ ID NO: 4026 - RNA, 19 nt, Homo sapiens
caguguuugaguccauguu

SEQ ID NO: 4027 - RNA, 19 nt, Homo sapiens
aguguuugaguccauguuu

SEQ ID NO: 4028 - RNA, 19 nt, Homo sapiens
guguuugaguccauguuua

SEQ ID NO: 4029 - RNA, 19 nt, Homo sapiens
uguuugaguccauguuuau

SEQ ID NO: 4030 - RNA, 19 nt, Homo sapiens
guuugaguccauguuuauu

SEQ ID NO: 4031 - RNA, 19 nt, Homo sapiens
uuugaguccauguuuauuc

SEQ ID NO: 4032 - RNA, 19 nt, Homo sapiens
uugaguccauguuuauucu

SEQ ID NO: 4033 - RNA, 19 nt, Homo sapiens
ugaguccauguuuauucug

SEQ ID NO: 4034 - RNA, 19 nt, Homo sapiens
gaguccauguuuauucugc

SEQ ID NO: 4035 - RNA, 19 nt, Homo sapiens
aguccauguuuauucugca

SEQ ID NO: 4036 - RNA, 19 nt, Homo sapiens
guccauguuuauucugcaa

SEQ ID NO: 4037 - RNA, 19 nt, Homo sapiens
uccauguuuauucugcaaa

SEQ ID NO: 4038 - RNA, 19 nt, Homo sapiens
ccauguuuauucugcaaau

SEQ ID NO: 4039 - RNA, 19 nt, Homo sapiens
cauguuuauucugcaaaua

SEQ ID NO: 4040 - RNA, 19 nt, Homo sapiens
auguuuauucugcaaauaa

SEQ ID NO: 4041 - RNA, 19 nt, Homo sapiens
uguuuauucugcaaauaaa

SEQ ID NO: 4042 - RNA, 19 nt, Homo sapiens
guuuauucugcaaauaaau

SEQ ID NO: 4043 - RNA, 19 nt, Homo sapiens
uuuauucugcaaauaaaug

SEQ ID NO: 4044 - RNA, 19 nt, Homo sapiens
uuauucugcaaauaaaugg

SEQ ID NO: 4045 - RNA, 19 nt, Homo sapiens
uauucugcaaauaaauggu

SEQ ID NO: 4046 - RNA, 19 nt, Homo sapiens
auucugcaaauaaauggua

SEQ ID NO: 4047 - RNA, 19 nt, Homo sapiens
uucugcaaauaaaugguaa

SEQ ID NO: 4048 - RNA, 19 nt, Homo sapiens
ucugcaaauaaaugguaau

SEQ ID NO: 4049 - RNA, 19 nt, Homo sapiens
cugcaaauaaaugguaaug

SEQ ID NO: 4050 - RNA, 19 nt, Homo sapiens
ugcaaauaaaugguaaugu

SEQ ID NO: 4051 - RNA, 19 nt, Homo sapiens
gcaaauaaaugguaaugua

SEQ ID NO: 4052 - RNA, 19 nt, Homo sapiens
caaauaaaugguaauguau

SEQ ID NO: 4053 - RNA, 19 nt, Homo sapiens
aaauaaaugguaauguauu

SEQ ID NO: 4054 - RNA, 19 nt, Homo sapiens
aauaaaugguaauguauug

SEQ ID NO: 4055 - RNA, 19 nt, Homo sapiens
auaaaugguaauguauugg

SEQ ID NO: 4056 - RNA, 19 nt, Homo sapiens
uaaaugguaauguauugga

SEQ ID NO: 4057 - RNA, 19 nt, Homo sapiens
cugccgagacaaugggagc

SEQ ID NO: 4058 - RNA, 19 nt, Homo sapiens
ucugccgagacaaugggag

SEQ ID NO: 4059 - RNA, 19 nt, Homo sapiens
aucugccgagacaauggga

SEQ ID NO: 4060 - RNA, 19 nt, Homo sapiens
caucugccgagacaauggg

SEQ ID NO: 4061 - RNA, 19 nt, Homo sapiens
gcaucugccgagacaaugg

SEQ ID NO: 4062 - RNA, 19 nt, Homo sapiens
ggcaucugccgagacaaug

SEQ ID NO: 4063 - RNA, 19 nt, Homo sapiens
cggcaucugccgagacaau

SEQ ID NO: 4064 - RNA, 19 nt, Homo sapiens
gcggcaucugccgagacaa

SEQ ID NO: 4065 - RNA, 19 nt, Homo sapiens
ggcggcaucugccgagaca

SEQ ID NO: 4066 - RNA, 19 nt, Homo sapiens
aggcggcaucugccgagac

SEQ ID NO: 4067 - RNA, 19 nt, Homo sapiens
caggcggcaucugccgaga

SEQ ID NO: 4068 - RNA, 19 nt, Homo sapiens
ccaggcggcaucugccgag

SEQ ID NO: 4069 - RNA, 19 nt, Homo sapiens
accaggcggcaucugccga

SEQ ID NO: 4070 - RNA, 19 nt, Homo sapiens
gaccaggcggcaucugccg

SEQ ID NO: 4071 - RNA, 19 nt, Homo sapiens
ggaccaggcggcaucugcc

SEQ ID NO: 4072 - RNA, 19 nt, Homo sapiens
uggaccaggcggcaucugc

SEQ ID NO: 4073 - RNA, 19 nt, Homo sapiens
cuggaccaggcggcaucug

SEQ ID NO: 4074 - RNA, 19 nt, Homo sapiens
gcuggaccaggcggcaucu

SEQ ID NO: 4075 - RNA, 19 nt, Homo sapiens
agcuggaccaggcggcauc

SEQ ID NO: 4076 - RNA, 19 nt, Homo sapiens
uagcuggaccaggcggcau

SEQ ID NO: 4077 - RNA, 19 nt, Homo sapiens
auagcuggaccaggcggca

SEQ ID NO: 4078 - RNA, 19 nt, Homo sapiens
gauagcuggaccaggcggc

SEQ ID NO: 4079 - RNA, 19 nt, Homo sapiens
cgauagcuggaccaggcgg

SEQ ID NO: 4080 - RNA, 19 nt, Homo sapiens
acgauagcuggaccaggcg

SEQ ID NO: 4081 - RNA, 19 nt, Homo sapiens
cacgauagcuggaccaggc

SEQ ID NO: 4082 - RNA, 19 nt, Homo sapiens
gcacgauagcuggaccagg

SEQ ID NO: 4083 - RNA, 19 nt, Homo sapiens
agcacgauagcuggaccag

SEQ ID NO: 4084 - RNA, 19 nt, Homo sapiens
gagcacgauagcuggacca

SEQ ID NO: 4085 - RNA, 19 nt, Homo sapiens
cgagcacgauagcuggacc

SEQ ID NO: 4086 - RNA, 19 nt, Homo sapiens
ccgagcacgauagcuggac

SEQ ID NO: 4087 - RNA, 19 nt, Homo sapiens
accgagcacgauagcugga

SEQ ID NO: 4088 - RNA, 19 nt, Homo sapiens
uaccgagcacgauagcugg

SEQ ID NO: 4089 - RNA, 19 nt, Homo sapiens
auaccgagcacgauagcug

SEQ ID NO: 4090 - RNA, 19 nt, Homo sapiens
aauaccgagcacgauagcu

SEQ ID NO: 4091 - RNA, 19 nt, Homo sapiens
gaauaccgagcacgauagc

SEQ ID NO: 4092 - RNA, 19 nt, Homo sapiens
ugaauaccgagcacgauag

SEQ ID NO: 4093 - RNA, 19 nt, Homo sapiens
cugaauaccgagcacgaua

SEQ ID NO: 4094 - RNA, 19 nt, Homo sapiens
acugaauaccgagcacgau

SEQ ID NO: 4095 - RNA, 19 nt, Homo sapiens
aacugaauaccgagcacga

SEQ ID NO: 4096 - RNA, 19 nt, Homo sapiens
aaacugaauaccgagcacg

SEQ ID NO: 4097 - RNA, 19 nt, Homo sapiens
aagagcgcugcuccggaaa

SEQ ID NO: 4098 - RNA, 19 nt, Homo sapiens
aaagagcgcugcuccggaa

SEQ ID NO: 4099 - RNA, 19 nt, Homo sapiens
gaaagagcgcugcuccgga

SEQ ID NO: 4100 - RNA, 19 nt, Homo sapiens
agaaagagcgcugcuccgg

SEQ ID NO: 4101 - RNA, 19 nt, Homo sapiens
gagaaagagcgcugcuccg

SEQ ID NO: 4102 - RNA, 19 nt, Homo sapiens
agagaaagagcgcugcucc

SEQ ID NO: 4103 - RNA, 19 nt, Homo sapiens
cagagaaagagcgcugcuc

SEQ ID NO: 4104 - RNA, 19 nt, Homo sapiens
ccagagaaagagcgcugcu

SEQ ID NO: 4105 - RNA, 19 nt, Homo sapiens
cgggaccgcuccgcgggcc

SEQ ID NO: 4106 - RNA, 19 nt, Homo sapiens
gcgggaccgcuccgcgggc

SEQ ID NO: 4107 - RNA, 19 nt, Homo sapiens
cgcgggaccgcuccgcggg

SEQ ID NO: 4108 - RNA, 19 nt, Homo sapiens
ccgcgggaccgcuccgcgg

SEQ ID NO: 4109 - RNA, 19 nt, Homo sapiens
gccgcgggaccgcuccgcg

SEQ ID NO: 4110 - RNA, 19 nt, Homo sapiens
ggccgcgggaccgcuccgc

SEQ ID NO: 4111 - RNA, 19 nt, Homo sapiens
cggccgcgggaccgcuccg

SEQ ID NO: 4112 - RNA, 19 nt, Homo sapiens
ucggccgcgggaccgcucc

SEQ ID NO: 4113 - RNA, 19 nt, Homo sapiens
cucggccgcgggaccgcuc

SEQ ID NO: 4114 - RNA, 19 nt, Homo sapiens
acucggccgcgggaccgcu

SEQ ID NO: 4115 - RNA, 19 nt, Homo sapiens
uacucggccgcgggaccgc

SEQ ID NO: 4116 - RNA, 19 nt, Homo sapiens
guacucggccgcgggaccg

SEQ ID NO: 4117 - RNA, 19 nt, Homo sapiens
gguacucggccgcgggacc

SEQ ID NO: 4118 - RNA, 19 nt, Homo sapiens
cgguacucggccgcgggac

SEQ ID NO: 4119 - RNA, 19 nt, Homo sapiens
ccgguacucggccgcggga

SEQ ID NO: 4120 - RNA, 19 nt, Homo sapiens
uccgguacucggccgcggg

SEQ ID NO: 4121 - RNA, 19 nt, Homo sapiens
auccgguacucggccgcgg

SEQ ID NO: 4122 - RNA, 19 nt, Homo sapiens
aauccgguacucggccgcg

SEQ ID NO: 4123 - RNA, 19 nt, Homo sapiens
gaauccgguacucggccgc

SEQ ID NO: 4124 - RNA, 19 nt, Homo sapiens
ggaauccgguacucggccg

SEQ ID NO: 4125 - RNA, 19 nt, Homo sapiens
gggaauccgguacucggcc

SEQ ID NO: 4126 - RNA, 19 nt, Homo sapiens
cgggaauccgguacucggc

SEQ ID NO: 4127 - RNA, 19 nt, Homo sapiens
ucgggaauccgguacucgg

SEQ ID NO: 4128 - RNA, 19 nt, Homo sapiens
cucgggaauccgguacucg

SEQ ID NO: 4129 - RNA, 19 nt, Homo sapiens
acucgggaauccgguacuc

SEQ ID NO: 4130 - RNA, 19 nt, Homo sapiens
aacucgggaauccgguacu

SEQ ID NO: 4131 - RNA, 19 nt, Homo sapiens
aaacucgggaauccgguac

SEQ ID NO: 4132 - RNA, 19 nt, Homo sapiens
caaacucgggaauccggua

SEQ ID NO: 4133 - RNA, 19 nt, Homo sapiens
ccaaacucgggaauccggu

SEQ ID NO: 4134 - RNA, 19 nt, Homo sapiens
cccaaacucgggaauccgg

SEQ ID NO: 4135 - RNA, 19 nt, Homo sapiens
ucccaaacucgggaauccg

SEQ ID NO: 4136 - RNA, 19 nt, Homo sapiens
cucccaaacucgggaaucc

SEQ ID NO: 4137 - RNA, 19 nt, Homo sapiens
ccucccaaacucgggaauc

SEQ ID NO: 4138 - RNA, 19 nt, Homo sapiens
gccucccaaacucgggaau

SEQ ID NO: 4139 - RNA, 19 nt, Homo sapiens
agccucccaaacucgggaa

SEQ ID NO: 4140 - RNA, 19 nt, Homo sapiens
gagccucccaaacucggga

SEQ ID NO: 4141 - RNA, 19 nt, Homo sapiens
agagccucccaaacucggg

SEQ ID NO: 4142 - RNA, 19 nt, Homo sapiens
cagagccucccaaacucgg

SEQ ID NO: 4143 - RNA, 19 nt, Homo sapiens
gcagagccucccaaacucg

SEQ ID NO: 4144 - RNA, 19 nt, Homo sapiens
agcagagccucccaaacuc

SEQ ID NO: 4145 - RNA, 19 nt, Homo sapiens
aagcagagccucccaaacu

SEQ ID NO: 4146 - RNA, 19 nt, Homo sapiens
aaagcagagccucccaaac

SEQ ID NO: 4147 - RNA, 19 nt, Homo sapiens
gaaagcagagccucccaaa

SEQ ID NO: 4148 - RNA, 19 nt, Homo sapiens
ggaaagcagagccucccaa

SEQ ID NO: 4149 - RNA, 19 nt, Homo sapiens
aggaaagcagagccuccca

SEQ ID NO: 4150 - RNA, 19 nt, Homo sapiens
gaggaaagcagagccuccc

SEQ ID NO: 4151 - RNA, 19 nt, Homo sapiens
ggaggaaagcagagccucc

SEQ ID NO: 4152 - RNA, 19 nt, Homo sapiens
aggaggaaagcagagccuc

SEQ ID NO: 4153 - RNA, 19 nt, Homo sapiens
aaggaggaaagcagagccu

SEQ ID NO: 4154 - RNA, 19 nt, Homo sapiens
uaaggaggaaagcagagcc

SEQ ID NO: 4155 - RNA, 19 nt, Homo sapiens
cuaaggaggaaagcagagc

SEQ ID NO: 4156 - RNA, 19 nt, Homo sapiens
ccuaaggaggaaagcagag

SEQ ID NO: 4157 - RNA, 19 nt, Homo sapiens
uccuaaggaggaaagcaga

SEQ ID NO: 4158 - RNA, 19 nt, Homo sapiens
guccuaaggaggaaagcag

SEQ ID NO: 4159 - RNA, 19 nt, Homo sapiens
gguccuaaggaggaaagca

SEQ ID NO: 4160 - RNA, 19 nt, Homo sapiens
ggguccuaaggaggaaagc

SEQ ID NO: 4161 - RNA, 19 nt, Homo sapiens
uggguccuaaggaggaaag

SEQ ID NO: 4162 - RNA, 19 nt, Homo sapiens
guggguccuaaggaggaaa

SEQ ID NO: 4163 - RNA, 19 nt, Homo sapiens
aguggguccuaaggaggaa

SEQ ID NO: 4164 - RNA, 19 nt, Homo sapiens
aaguggguccuaaggagga

SEQ ID NO: 4165 - RNA, 19 nt, Homo sapiens
aaaguggguccuaaggagg

SEQ ID NO: 4166 - RNA, 19 nt, Homo sapiens
caaaguggguccuaaggag

SEQ ID NO: 4167 - RNA, 19 nt, Homo sapiens
gcaaaguggguccuaagga

SEQ ID NO: 4168 - RNA, 19 nt, Homo sapiens
ggcaaaguggguccuaagg

SEQ ID NO: 4169 - RNA, 19 nt, Homo sapiens
cggcaaaguggguccuaag

SEQ ID NO: 4170 - RNA, 19 nt, Homo sapiens
acggcaaaguggguccuaa

SEQ ID NO: 4171 - RNA, 19 nt, Homo sapiens
gacggcaaaguggguccua

SEQ ID NO: 4172 - RNA, 19 nt, Homo sapiens
ggacggcaaaguggguccu

SEQ ID NO: 4173 - RNA, 19 nt, Homo sapiens
aggacggcaaagugggucc

SEQ ID NO: 4174 - RNA, 19 nt, Homo sapiens
caggacggcaaaguggguc

SEQ ID NO: 4175 - RNA, 19 nt, Homo sapiens
ccaggacggcaaagugggu

SEQ ID NO: 4176 - RNA, 19 nt, Homo sapiens
cccaggacggcaaaguggg

SEQ ID NO: 4177 - RNA, 19 nt, Homo sapiens
cgcggacauaacugcagcc

SEQ ID NO: 4178 - RNA, 19 nt, Homo sapiens
gcgcggacauaacugcagc

SEQ ID NO: 4179 - RNA, 19 nt, Homo sapiens
agcgcggacauaacugcag

SEQ ID NO: 4180 - RNA, 19 nt, Homo sapiens
cagcgcggacauaacugca

SEQ ID NO: 4181 - RNA, 19 nt, Homo sapiens
gcagcgcggacauaacugc

SEQ ID NO: 4182 - RNA, 19 nt, Homo sapiens
cgcagcgcggacauaacug

SEQ ID NO: 4183 - RNA, 19 nt, Homo sapiens
ucgcagcgcggacauaacu

SEQ ID NO: 4184 - RNA, 19 nt, Homo sapiens
gucgcagcgcggacauaac

SEQ ID NO: 4185 - RNA, 19 nt, Homo sapiens
ggucgcagcgcggacauaa

SEQ ID NO: 4186 - RNA, 19 nt, Homo sapiens
aggucgcagcgcggacaua

SEQ ID NO: 4187 - RNA, 19 nt, Homo sapiens
gaggucgcagcgcggacau

SEQ ID NO: 4188 - RNA, 19 nt, Homo sapiens
agaggucgcagcgcggaca

SEQ ID NO: 4189 - RNA, 19 nt, Homo sapiens
gagaggucgcagcgcggac

SEQ ID NO: 4190 - RNA, 19 nt, Homo sapiens
ggagaggucgcagcgcgga

SEQ ID NO: 4191 - RNA, 19 nt, Homo sapiens
aggagaggucgcagcgcgg

SEQ ID NO: 4192 - RNA, 19 nt, Homo sapiens
caggagaggucgcagcgcg

SEQ ID NO: 4193 - RNA, 19 nt, Homo sapiens
gcaggagaggucgcagcgc

SEQ ID NO: 4194 - RNA, 19 nt, Homo sapiens
agcaggagaggucgcagcg

SEQ ID NO: 4195 - RNA, 19 nt, Homo sapiens
aagcaggagaggucgcagc

SEQ ID NO: 4196 - RNA, 19 nt, Homo sapiens
gaagcaggagaggucgcag

SEQ ID NO: 4197 - RNA, 19 nt, Homo sapiens
agaagcaggagaggucgca

SEQ ID NO: 4198 - RNA, 19 nt, Homo sapiens
cagaagcaggagaggucgc

SEQ ID NO: 4199 - RNA, 19 nt, Homo sapiens
gcagaagcaggagaggucg

SEQ ID NO: 4200 - RNA, 19 nt, Homo sapiens
agcagaagcaggagagguc

SEQ ID NO: 4201 - RNA, 19 nt, Homo sapiens
cagcagaagcaggagaggu

SEQ ID NO: 4202 - RNA, 19 nt, Homo sapiens
gcagcagaagcaggagagg

SEQ ID NO: 4203 - RNA, 19 nt, Homo sapiens
agcagcagaagcaggagag

SEQ ID NO: 4204 - RNA, 19 nt, Homo sapiens
cagcagcagaagcaggaga

SEQ ID NO: 4205 - RNA, 19 nt, Homo sapiens
gcagcagcagaagcaggag

SEQ ID NO: 4206 - RNA, 19 nt, Homo sapiens
ggcagcagcagaagcagga

SEQ ID NO: 4207 - RNA, 19 nt, Homo sapiens
aggcagcagcagaagcagg

SEQ ID NO: 4208 - RNA, 19 nt, Homo sapiens
gaggcagcagcagaagcag

SEQ ID NO: 4209 - RNA, 19 nt, Homo sapiens
agaggcagcagcagaagca

SEQ ID NO: 4210 - RNA, 19 nt, Homo sapiens
cagaggcagcagcagaagc

SEQ ID NO: 4211 - RNA, 19 nt, Homo sapiens
acagaggcagcagcagaag

SEQ ID NO: 4212 - RNA, 19 nt, Homo sapiens
cacagaggcagcagcagaa

SEQ ID NO: 4213 - RNA, 19 nt, Homo sapiens
acacagaggcagcagcaga

SEQ ID NO: 4214 - RNA, 19 nt, Homo sapiens
gacacagaggcagcagcag

SEQ ID NO: 4215 - RNA, 19 nt, Homo sapiens
ggacacagaggcagcagca

SEQ ID NO: 4216 - RNA, 19 nt, Homo sapiens
gggacacagaggcagcagc

SEQ ID NO: 4217 - RNA, 19 nt, Homo sapiens
cgggacacagaggcagcag

SEQ ID NO: 4218 - RNA, 19 nt, Homo sapiens
ccgggacacagaggcagca

SEQ ID NO: 4219 - RNA, 19 nt, Homo sapiens
accgggacacagaggcagc

SEQ ID NO: 4220 - RNA, 19 nt, Homo sapiens
gaccgggacacagaggcag

SEQ ID NO: 4221 - RNA, 19 nt, Homo sapiens
ggaccgggacacagaggca

SEQ ID NO: 4222 - RNA, 19 nt, Homo sapiens
aggaccgggacacagaggc

SEQ ID NO: 4223 - RNA, 19 nt, Homo sapiens
caggaccgggacacagagg

SEQ ID NO: 4224 - RNA, 19 nt, Homo sapiens
ccaggaccgggacacagag

SEQ ID NO: 4225 - RNA, 19 nt, Homo sapiens
accaggaccgggacacaga

SEQ ID NO: 4226 - RNA, 19 nt, Homo sapiens
gaccaggaccgggacacag

SEQ ID NO: 4227 - RNA, 19 nt, Homo sapiens
ggaccaggaccgggacaca

SEQ ID NO: 4228 - RNA, 19 nt, Homo sapiens
gggaccaggaccgggacac

SEQ ID NO: 4229 - RNA, 19 nt, Homo sapiens
cgggaccaggaccgggaca

SEQ ID NO: 4230 - RNA, 19 nt, Homo sapiens
ccgggaccaggaccgggac

SEQ ID NO: 4231 - RNA, 19 nt, Homo sapiens
uccgggaccaggaccggga

SEQ ID NO: 4232 - RNA, 19 nt, Homo sapiens
guccgggaccaggaccggg

SEQ ID NO: 4233 - RNA, 19 nt, Homo sapiens
gguccgggaccaggaccgg

SEQ ID NO: 4234 - RNA, 19 nt, Homo sapiens
ggguccgggaccaggaccg

SEQ ID NO: 4235 - RNA, 19 nt, Homo sapiens
cggguccgggaccaggacc

SEQ ID NO: 4236 - RNA, 19 nt, Homo sapiens
ccggguccgggaccaggac

SEQ ID NO: 4237 - RNA, 19 nt, Homo sapiens
cccggguccgggaccagga

SEQ ID NO: 4238 - RNA, 19 nt, Homo sapiens
ucccggguccgggaccagg

SEQ ID NO: 4239 - RNA, 19 nt, Homo sapiens
cucccggguccgggaccag

SEQ ID NO: 4240 - RNA, 19 nt, Homo sapiens
gcucccggguccgggacca

SEQ ID NO: 4241 - RNA, 19 nt, Homo sapiens
cgcucccggguccgggacc

SEQ ID NO: 4242 - RNA, 19 nt, Homo sapiens
ucgcucccggguccgggac

SEQ ID NO: 4243 - RNA, 19 nt, Homo sapiens
cucgcucccggguccggga

SEQ ID NO: 4244 - RNA, 19 nt, Homo sapiens
ccucgcucccggguccggg

SEQ ID NO: 4245 - RNA, 19 nt, Homo sapiens
gccucgcucccggguccgg

SEQ ID NO: 4246 - RNA, 19 nt, Homo sapiens
ugccucgcucccggguccg

SEQ ID NO: 4247 - RNA, 19 nt, Homo sapiens
uugccucgcucccgggucc

SEQ ID NO: 4248 - RNA, 19 nt, Homo sapiens
uuugccucgcucccggguc

SEQ ID NO: 4249 - RNA, 19 nt, Homo sapiens
cuuugccucgcucccgggu

SEQ ID NO: 4250 - RNA, 19 nt, Homo sapiens
ccuuugccucgcucccggg

SEQ ID NO: 4251 - RNA, 19 nt, Homo sapiens
accuuugccucgcucccgg

SEQ ID NO: 4252 - RNA, 19 nt, Homo sapiens
gaccuuugccucgcucccg

SEQ ID NO: 4253 - RNA, 19 nt, Homo sapiens
ugaccuuugccucgcuccc

SEQ ID NO: 4254 - RNA, 19 nt, Homo sapiens
gugaccuuugccucgcucc

SEQ ID NO: 4255 - RNA, 19 nt, Homo sapiens
ggugaccuuugccucgcuc

SEQ ID NO: 4256 - RNA, 19 nt, Homo sapiens
gggugaccuuugccucgcu

SEQ ID NO: 4257 - RNA, 19 nt, Homo sapiens
cgggugaccuuugccucgc

SEQ ID NO: 4258 - RNA, 19 nt, Homo sapiens
ccgggugaccuuugccucg

SEQ ID NO: 4259 - RNA, 19 nt, Homo sapiens
uccgggugaccuuugccuc

SEQ ID NO: 4260 - RNA, 19 nt, Homo sapiens
cuccgggugaccuuugccu

SEQ ID NO: 4261 - RNA, 19 nt, Homo sapiens
acuccgggugaccuuugcc

SEQ ID NO: 4262 - RNA, 19 nt, Homo sapiens
aacuccgggugaccuuugc

SEQ ID NO: 4263 - RNA, 19 nt, Homo sapiens
caacuccgggugaccuuug

SEQ ID NO: 4264 - RNA, 19 nt, Homo sapiens
acaacuccgggugaccuuu

SEQ ID NO: 4265 - RNA, 19 nt, Homo sapiens
cacaacuccgggugaccuu

SEQ ID NO: 4266 - RNA, 19 nt, Homo sapiens
gcacaacuccgggugaccu

SEQ ID NO: 4267 - RNA, 19 nt, Homo sapiens
ugcacaacuccgggugacc

SEQ ID NO: 4268 - RNA, 19 nt, Homo sapiens
cugcacaacuccgggugac

SEQ ID NO: 4269 - RNA, 19 nt, Homo sapiens
ucugcacaacuccggguga

SEQ ID NO: 4270 - RNA, 19 nt, Homo sapiens
cucugcacaacuccgggug

SEQ ID NO: 4271 - RNA, 19 nt, Homo sapiens
ucucugcacaacuccgggu

SEQ ID NO: 4272 - RNA, 19 nt, Homo sapiens
gucucugcacaacuccggg

SEQ ID NO: 4273 - RNA, 19 nt, Homo sapiens
ggucucugcacaacuccgg

SEQ ID NO: 4274 - RNA, 19 nt, Homo sapiens
gggucucugcacaacuccg

SEQ ID NO: 4275 - RNA, 19 nt, Homo sapiens
cgggucucugcacaacucc

SEQ ID NO: 4276 - RNA, 19 nt, Homo sapiens
ccgggucucugcacaacuc

SEQ ID NO: 4277 - RNA, 19 nt, Homo sapiens
gccgggucucugcacaacu

SEQ ID NO: 4278 - RNA, 19 nt, Homo sapiens
ugccgggucucugcacaac

SEQ ID NO: 4279 - RNA, 19 nt, Homo sapiens
cugccgggucucugcacaa

SEQ ID NO: 4280 - RNA, 19 nt, Homo sapiens
ccugccgggucucugcaca

SEQ ID NO: 4281 - RNA, 19 nt, Homo sapiens
accugccgggucucugcac

SEQ ID NO: 4282 - RNA, 19 nt, Homo sapiens
caccugccgggucucugca

SEQ ID NO: 4283 - RNA, 19 nt, Homo sapiens
gcaccugccgggucucugc

SEQ ID NO: 4284 - RNA, 19 nt, Homo sapiens
agcaccugccgggucucug

SEQ ID NO: 4285 - RNA, 19 nt, Homo sapiens
cagcaccugccgggucucu

SEQ ID NO: 4286 - RNA, 19 nt, Homo sapiens
ccagcaccugccgggucuc

SEQ ID NO: 4287 - RNA, 19 nt, Homo sapiens
cccagcaccugccgggucu

SEQ ID NO: 4288 - RNA, 19 nt, Homo sapiens
uagguuuaagcuauauccc

SEQ ID NO: 4289 - RNA, 19 nt, Homo sapiens
uuagguuuaagcuauaucc

SEQ ID NO: 4290 - RNA, 19 nt, Homo sapiens
auuagguuuaagcuauauc

SEQ ID NO: 4291 - RNA, 19 nt, Homo sapiens
gauuagguuuaagcuauau

SEQ ID NO: 4292 - RNA, 19 nt, Homo sapiens
ggauuagguuuaagcuaua

SEQ ID NO: 4293 - RNA, 19 nt, Homo sapiens
gggauuagguuuaagcuau

SEQ ID NO: 4294 - RNA, 19 nt, Homo sapiens
agggauuagguuuaagcua

SEQ ID NO: 4295 - RNA, 19 nt, Homo sapiens
gagggauuagguuuaagcu

SEQ ID NO: 4296 - RNA, 19 nt, Homo sapiens
ggagggauuagguuuaagc

SEQ ID NO: 4297 - RNA, 19 nt, Homo sapiens
gggagggauuagguuuaag

SEQ ID NO: 4298 - RNA, 19 nt, Homo sapiens
cgggagggauuagguuuaa

SEQ ID NO: 4299 - RNA, 19 nt, Homo sapiens
gcgggagggauuagguuua

SEQ ID NO: 4300 - RNA, 19 nt, Homo sapiens
ggcgggagggauuagguuu

SEQ ID NO: 4301 - RNA, 19 nt, Homo sapiens
gggcgggagggauuagguu

SEQ ID NO: 4302 - RNA, 19 nt, Homo sapiens
agggcgggagggauuaggu

SEQ ID NO: 4303 - RNA, 19 nt, Homo sapiens
cagggcgggagggauuagg

SEQ ID NO: 4304 - RNA, 19 nt, Homo sapiens
ucagggcgggagggauuag

SEQ ID NO: 4305 - RNA, 19 nt, Homo sapiens
aucagggcgggagggauua

SEQ ID NO: 4306 - RNA, 19 nt, Homo sapiens
gaucagggcgggagggauu

SEQ ID NO: 4307 - RNA, 19 nt, Homo sapiens
agaucagggcgggagggau

SEQ ID NO: 4308 - RNA, 19 nt, Homo sapiens
gagaucagggcgggaggga

SEQ ID NO: 4309 - RNA, 19 nt, Homo sapiens
ugagaucagggcgggaggg

SEQ ID NO: 4310 - RNA, 19 nt, Homo sapiens
cugagaucagggcgggagg

SEQ ID NO: 4311 - RNA, 19 nt, Homo sapiens
ccugagaucagggcgggag

SEQ ID NO: 4312 - RNA, 19 nt, Homo sapiens
accugagaucagggcggga

SEQ ID NO: 4313 - RNA, 19 nt, Homo sapiens
caccugagaucagggcggg

SEQ ID NO: 4314 - RNA, 19 nt, Homo sapiens
ucaccugagaucagggcgg

SEQ ID NO: 4315 - RNA, 19 nt, Homo sapiens
cucaccugagaucagggcg

SEQ ID NO: 4316 - RNA, 19 nt, Homo sapiens
gcucaccugagaucagggc

SEQ ID NO: 4317 - RNA, 19 nt, Homo sapiens
ugcucaccugagaucaggg

SEQ ID NO: 4318 - RNA, 19 nt, Homo sapiens
gugcucaccugagaucagg

SEQ ID NO: 4319 - RNA, 19 nt, Homo sapiens
ggugcucaccugagaucag

SEQ ID NO: 4320 - RNA, 19 nt, Homo sapiens
aggugcucaccugagauca

SEQ ID NO: 4321 - RNA, 19 nt, Homo sapiens
gaggugcucaccugagauc

SEQ ID NO: 4322 - RNA, 19 nt, Homo sapiens
ggaggugcucaccugagau

SEQ ID NO: 4323 - RNA, 19 nt, Homo sapiens
cggaggugcucaccugaga

SEQ ID NO: 4324 - RNA, 19 nt, Homo sapiens
ccggaggugcucaccugag

SEQ ID NO: 4325 - RNA, 19 nt, Homo sapiens
cccggaggugcucaccuga

SEQ ID NO: 4326 - RNA, 19 nt, Homo sapiens
acccggaggugcucaccug

SEQ ID NO: 4327 - RNA, 19 nt, Homo sapiens
gacccggaggugcucaccu

SEQ ID NO: 4328 - RNA, 19 nt, Homo sapiens
agacccggaggugcucacc

SEQ ID NO: 4329 - RNA, 19 nt, Homo sapiens
cagacccggaggugcucac

SEQ ID NO: 4330 - RNA, 19 nt, Homo sapiens
acagacccggaggugcuca

SEQ ID NO: 4331 - RNA, 19 nt, Homo sapiens
gacagacccggaggugcuc

SEQ ID NO: 4332 - RNA, 19 nt, Homo sapiens
ggacagacccggaggugcu

SEQ ID NO: 4333 - RNA, 19 nt, Homo sapiens
gggacagacccggaggugc

SEQ ID NO: 4334 - RNA, 19 nt, Homo sapiens
cagcagguguacuccuggg

SEQ ID NO: 4335 - RNA, 19 nt, Homo sapiens
acagcagguguacuccugg

SEQ ID NO: 4336 - RNA, 19 nt, Homo sapiens
aacagcagguguacuccug

SEQ ID NO: 4337 - RNA, 19 nt, Homo sapiens
gaacagcagguguacuccu

SEQ ID NO: 4338 - RNA, 19 nt, Homo sapiens
ggaacagcagguguacucc

SEQ ID NO: 4339 - RNA, 19 nt, Homo sapiens
uggaacagcagguguacuc

SEQ ID NO: 4340 - RNA, 19 nt, Homo sapiens
cuggaacagcagguguacu

SEQ ID NO: 4341 - RNA, 19 nt, Homo sapiens
acuggaacagcagguguac

SEQ ID NO: 4342 - RNA, 19 nt, Homo sapiens
cacuggaacagcaggugua

SEQ ID NO: 4343 - RNA, 19 nt, Homo sapiens
ucacuggaacagcaggugu

SEQ ID NO: 4344 - RNA, 19 nt, Homo sapiens
cucacuggaacagcaggug

SEQ ID NO: 4345 - RNA, 19 nt, Homo sapiens
ucucacuggaacagcaggu

SEQ ID NO: 4346 - RNA, 19 nt, Homo sapiens
gucucacuggaacagcagg

SEQ ID NO: 4347 - RNA, 19 nt, Homo sapiens
ugucucacuggaacagcag

SEQ ID NO: 4348 - RNA, 19 nt, Homo sapiens
cugucucacuggaacagca

SEQ ID NO: 4349 - RNA, 19 nt, Homo sapiens
ucugucucacuggaacagc

SEQ ID NO: 4350 - RNA, 19 nt, Homo sapiens
cucugucucacuggaacag

SEQ ID NO: 4351 - RNA, 19 nt, Homo sapiens
gcucugucucacuggaaca

SEQ ID NO: 4352 - RNA, 19 nt, Homo sapiens
ugcucugucucacuggaac

SEQ ID NO: 4353 - RNA, 19 nt, Homo sapiens
cugcucugucucacuggaa

SEQ ID NO: 4354 - RNA, 19 nt, Homo sapiens
ucugcucugucucacugga

SEQ ID NO: 4355 - RNA, 19 nt, Homo sapiens
cucugcucugucucacugg

SEQ ID NO: 4356 - RNA, 19 nt, Homo sapiens
ccucugcucugucucacug

SEQ ID NO: 4357 - RNA, 19 nt, Homo sapiens
gccucugcucugucucacu

SEQ ID NO: 4358 - RNA, 19 nt, Homo sapiens
agccucugcucugucucac

SEQ ID NO: 4359 - RNA, 19 nt, Homo sapiens
cagccucugcucugucuca

SEQ ID NO: 4360 - RNA, 19 nt, Homo sapiens
ucagccucugcucugucuc

SEQ ID NO: 4361 - RNA, 19 nt, Homo sapiens
aucagccucugcucugucu

SEQ ID NO: 4362 - RNA, 19 nt, Homo sapiens
gaucagccucugcucuguc

SEQ ID NO: 4363 - RNA, 19 nt, Homo sapiens
ugaucagccucugcucugu

SEQ ID NO: 4364 - RNA, 19 nt, Homo sapiens
cugaucagccucugcucug

SEQ ID NO: 4365 - RNA, 19 nt, Homo sapiens
ccugaucagccucugcucu

SEQ ID NO: 4366 - RNA, 19 nt, Homo sapiens
cccugaucagccucugcuc

SEQ ID NO: 4367 - RNA, 19 nt, Homo sapiens
ucccugaucagccucugcu

SEQ ID NO: 4368 - RNA, 19 nt, Homo sapiens
cucccugaucagccucugc

SEQ ID NO: 4369 - RNA, 19 nt, Homo sapiens
ucucccugaucagccucug

SEQ ID NO: 4370 - RNA, 19 nt, Homo sapiens
gucucccugaucagccucu

SEQ ID NO: 4371 - RNA, 19 nt, Homo sapiens
agucucccugaucagccuc

SEQ ID NO: 4372 - RNA, 19 nt, Homo sapiens
cagucucccugaucagccu

SEQ ID NO: 4373 - RNA, 19 nt, Homo sapiens
ucagucucccugaucagcc

SEQ ID NO: 4374 - RNA, 19 nt, Homo sapiens
cucagucucccugaucagc

SEQ ID NO: 4375 - RNA, 19 nt, Homo sapiens
ccucagucucccugaucag

SEQ ID NO: 4376 - RNA, 19 nt, Homo sapiens
gccucagucucccugauca

SEQ ID NO: 4377 - RNA, 19 nt, Homo sapiens
ggccucagucucccugauc

SEQ ID NO: 4378 - RNA, 19 nt, Homo sapiens
accaggccucggaaggugg

SEQ ID NO: 4379 - RNA, 19 nt, Homo sapiens
caccaggccucggaaggug

SEQ ID NO: 4380 - RNA, 19 nt, Homo sapiens
ccaccaggccucggaaggu

SEQ ID NO: 4381 - RNA, 19 nt, Homo sapiens
uccaccaggccucggaagg

SEQ ID NO: 4382 - RNA, 19 nt, Homo sapiens
cuccaccaggccucggaag

SEQ ID NO: 4383 - RNA, 19 nt, Homo sapiens
ccuccaccaggccucggaa

SEQ ID NO: 4384 - RNA, 19 nt, Homo sapiens
uccuccaccaggccucgga

SEQ ID NO: 4385 - RNA, 19 nt, Homo sapiens
guccuccaccaggccucgg

SEQ ID NO: 4386 - RNA, 19 nt, Homo sapiens
uguccuccaccaggccucg

SEQ ID NO: 4387 - RNA, 19 nt, Homo sapiens
cuguccuccaccaggccuc

SEQ ID NO: 4388 - RNA, 19 nt, Homo sapiens
gcuguccuccaccaggccu

SEQ ID NO: 4389 - RNA, 19 nt, Homo sapiens
cgcuguccuccaccaggcc

SEQ ID NO: 4390 - RNA, 19 nt, Homo sapiens
ccgcuguccuccaccaggc

SEQ ID NO: 4391 - RNA, 19 nt, Homo sapiens
gccgcuguccuccaccagg

SEQ ID NO: 4392 - RNA, 19 nt, Homo sapiens
agccgcuguccuccaccag

SEQ ID NO: 4393 - RNA, 19 nt, Homo sapiens
gagccgcuguccuccacca

SEQ ID NO: 4394 - RNA, 19 nt, Homo sapiens
ggagccgcuguccuccacc

SEQ ID NO: 4395 - RNA, 19 nt, Homo sapiens
aggagccgcuguccuccac

SEQ ID NO: 4396 - RNA, 19 nt, Homo sapiens
aaggagccgcuguccucca

SEQ ID NO: 4397 - RNA, 19 nt, Homo sapiens
aaaggagccgcuguccucc

SEQ ID NO: 4398 - RNA, 19 nt, Homo sapiens
gaaaggagccgcuguccuc

SEQ ID NO: 4399 - RNA, 19 nt, Homo sapiens
agaaaggagccgcuguccu

SEQ ID NO: 4400 - RNA, 19 nt, Homo sapiens
cagaaaggagccgcugucc

SEQ ID NO: 4401 - RNA, 19 nt, Homo sapiens
ccagaaaggagccgcuguc

SEQ ID NO: 4402 - RNA, 19 nt, Homo sapiens
accagaaaggagccgcugu

SEQ ID NO: 4403 - RNA, 19 nt, Homo sapiens
aaccagaaaggagccgcug

SEQ ID NO: 4404 - RNA, 19 nt, Homo sapiens
gaaccagaaaggagccgcu

SEQ ID NO: 4405 - RNA, 19 nt, Homo sapiens
ugaaccagaaaggagccgc

SEQ ID NO: 4406 - RNA, 19 nt, Homo sapiens
gugaaccagaaaggagccg

SEQ ID NO: 4407 - RNA, 19 nt, Homo sapiens
ugugaaccagaaaggagcc

SEQ ID NO: 4408 - RNA, 19 nt, Homo sapiens
gugugaaccagaaaggagc

SEQ ID NO: 4409 - RNA, 19 nt, Homo sapiens
cugagagcaucuccagaaa

SEQ ID NO: 4410 - RNA, 19 nt, Homo sapiens
acugagagcaucuccagaa

SEQ ID NO: 4411 - RNA, 19 nt, Homo sapiens
uacugagagcaucuccaga

SEQ ID NO: 4412 - RNA, 19 nt, Homo sapiens
cuacugagagcaucuccag

SEQ ID NO: 4413 - RNA, 19 nt, Homo sapiens
gcuacugagagcaucucca

SEQ ID NO: 4414 - RNA, 19 nt, Homo sapiens
ggcuacugagagcaucucc

SEQ ID NO: 4415 - RNA, 19 nt, Homo sapiens
gggcuacugagagcaucuc

SEQ ID NO: 4416 - RNA, 19 nt, Homo sapiens
ugggcuacugagagcaucu

SEQ ID NO: 4417 - RNA, 19 nt, Homo sapiens
cugggcuacugagagcauc

SEQ ID NO: 4418 - RNA, 19 nt, Homo sapiens
gcugggcuacugagagcau

SEQ ID NO: 4419 - RNA, 19 nt, Homo sapiens
ugcugggcuacugagagca

SEQ ID NO: 4420 - RNA, 19 nt, Homo sapiens
gugcugggcuacugagagc

SEQ ID NO: 4421 - RNA, 19 nt, Homo sapiens
agugcugggcuacugagag

SEQ ID NO: 4422 - RNA, 19 nt, Homo sapiens
gagugcugggcuacugaga

SEQ ID NO: 4423 - RNA, 19 nt, Homo sapiens
agagugcugggcuacugag

SEQ ID NO: 4424 - RNA, 19 nt, Homo sapiens
gagagugcugggcuacuga

SEQ ID NO: 4425 - RNA, 19 nt, Homo sapiens
agagagugcugggcuacug

SEQ ID NO: 4426 - RNA, 19 nt, Homo sapiens
cagagagugcugggcuacu

SEQ ID NO: 4427 - RNA, 19 nt, Homo sapiens
ucagagagugcugggcuac

SEQ ID NO: 4428 - RNA, 19 nt, Homo sapiens
gucagagagugcugggcua

SEQ ID NO: 4429 - RNA, 19 nt, Homo sapiens
ggucagagagugcugggcu

SEQ ID NO: 4430 - RNA, 19 nt, Homo sapiens
gggucagagagugcugggc

SEQ ID NO: 4431 - RNA, 19 nt, Homo sapiens
ugggucagagagugcuggg

SEQ ID NO: 4432 - RNA, 19 nt, Homo sapiens
cugggucagagagugcugg

SEQ ID NO: 4433 - RNA, 19 nt, Homo sapiens
gcugggucagagagugcug

SEQ ID NO: 4434 - RNA, 19 nt, Homo sapiens
agcugggucagagagugcu

SEQ ID NO: 4435 - RNA, 19 nt, Homo sapiens
gagcugggucagagagugc

SEQ ID NO: 4436 - RNA, 19 nt, Homo sapiens
agagcugggucagagagug

SEQ ID NO: 4437 - RNA, 19 nt, Homo sapiens
aagagcugggucagagagu

SEQ ID NO: 4438 - RNA, 19 nt, Homo sapiens
gaagagcugggucagagag

SEQ ID NO: 4439 - RNA, 19 nt, Homo sapiens
agaagagcugggucagaga

SEQ ID NO: 4440 - RNA, 19 nt, Homo sapiens
gagaagagcugggucagag

SEQ ID NO: 4441 - RNA, 19 nt, Homo sapiens
ggagaagagcugggucaga

SEQ ID NO: 4442 - RNA, 19 nt, Homo sapiens
gggagaagagcugggucag

SEQ ID NO: 4443 - RNA, 19 nt, Homo sapiens
ugggagaagagcuggguca

SEQ ID NO: 4444 - RNA, 19 nt, Homo sapiens
gugggagaagagcuggguc

SEQ ID NO: 4445 - RNA, 19 nt, Homo sapiens
agugggagaagagcugggu

SEQ ID NO: 4446 - RNA, 19 nt, Homo sapiens
gagugggagaagagcuggg

SEQ ID NO: 4447 - RNA, 19 nt, Homo sapiens
ggagugggagaagagcugg

SEQ ID NO: 4448 - RNA, 19 nt, Homo sapiens
aggagugggagaagagcug

SEQ ID NO: 4449 - RNA, 19 nt, Homo sapiens
uaggagugggagaagagcu

SEQ ID NO: 4450 - RNA, 19 nt, Homo sapiens
guaggagugggagaagagc

SEQ ID NO: 4451 - RNA, 19 nt, Homo sapiens
cguaggagugggagaagag

SEQ ID NO: 4452 - RNA, 19 nt, Homo sapiens
ccguaggagugggagaaga

SEQ ID NO: 4453 - RNA, 19 nt, Homo sapiens
gccguaggagugggagaag

SEQ ID NO: 4454 - RNA, 19 nt, Homo sapiens
ggccguaggagugggagaa

SEQ ID NO: 4455 - RNA, 19 nt, Homo sapiens
cggccguaggagugggaga

SEQ ID NO: 4456 - RNA, 19 nt, Homo sapiens
gcggccguaggagugggag

SEQ ID NO: 4457 - RNA, 19 nt, Homo sapiens
ggcggccguaggaguggga

SEQ ID NO: 4458 - RNA, 19 nt, Homo sapiens
aggcggccguaggaguggg

SEQ ID NO: 4459 - RNA, 19 nt, Homo sapiens
caggcggccguaggagugg

SEQ ID NO: 4460 - RNA, 19 nt, Homo sapiens
acaggcggccguaggagug

SEQ ID NO: 4461 - RNA, 19 nt, Homo sapiens
uacaggcggccguaggagu

SEQ ID NO: 4462 - RNA, 19 nt, Homo sapiens
auacaggcggccguaggag

SEQ ID NO: 4463 - RNA, 19 nt, Homo sapiens
cauacaggcggccguagga

SEQ ID NO: 4464 - RNA, 19 nt, Homo sapiens
gcauacaggcggccguagg

SEQ ID NO: 4465 - RNA, 19 nt, Homo sapiens
ggcauacaggcggccguag

SEQ ID NO: 4466 - RNA, 19 nt, Homo sapiens
gggcauacaggcggccgua

SEQ ID NO: 4467 - RNA, 19 nt, Homo sapiens
ugggcauacaggcggccgu

SEQ ID NO: 4468 - RNA, 19 nt, Homo sapiens
cugggcauacaggcggccg

SEQ ID NO: 4469 - RNA, 19 nt, Homo sapiens
gcugggcauacaggcggcc

SEQ ID NO: 4470 - RNA, 19 nt, Homo sapiens
ugcugggcauacaggcggc

SEQ ID NO: 4471 - RNA, 19 nt, Homo sapiens
gugcugggcauacaggcgg

SEQ ID NO: 4472 - RNA, 19 nt, Homo sapiens
cgugcugggcauacaggcg

SEQ ID NO: 4473 - RNA, 19 nt, Homo sapiens
gcgugcugggcauacaggc

SEQ ID NO: 4474 - RNA, 19 nt, Homo sapiens
ggcgugcugggcauacagg

SEQ ID NO: 4475 - RNA, 19 nt, Homo sapiens
gggcgugcugggcauacag

SEQ ID NO: 4476 - RNA, 19 nt, Homo sapiens
agggcgugcugggcauaca

SEQ ID NO: 4477 - RNA, 19 nt, Homo sapiens
gagggcgugcugggcauac

SEQ ID NO: 4478 - RNA, 19 nt, Homo sapiens
ugagggcgugcugggcaua

SEQ ID NO: 4479 - RNA, 19 nt, Homo sapiens
augagggcgugcugggcau

SEQ ID NO: 4480 - RNA, 19 nt, Homo sapiens
uaugagggcgugcugggca

SEQ ID NO: 4481 - RNA, 19 nt, Homo sapiens
auaugagggcgugcugggc

SEQ ID NO: 4482 - RNA, 19 nt, Homo sapiens
aauaugagggcgugcuggg

SEQ ID NO: 4483 - RNA, 19 nt, Homo sapiens
gaauaugagggcgugcugg

SEQ ID NO: 4484 - RNA, 19 nt, Homo sapiens
ugaauaugagggcgugcug

SEQ ID NO: 4485 - RNA, 19 nt, Homo sapiens
uugaauaugagggcgugcu

SEQ ID NO: 4486 - RNA, 19 nt, Homo sapiens
auugaauaugagggcgugc

SEQ ID NO: 4487 - RNA, 19 nt, Homo sapiens
cauugaauaugagggcgug

SEQ ID NO: 4488 - RNA, 19 nt, Homo sapiens
ccauugaauaugagggcgu

SEQ ID NO: 4489 - RNA, 19 nt, Homo sapiens
gcagccgagagaacaggcc

SEQ ID NO: 4490 - RNA, 19 nt, Homo sapiens
cgcagccgagagaacaggc

SEQ ID NO: 4491 - RNA, 19 nt, Homo sapiens
ucgcagccgagagaacagg

SEQ ID NO: 4492 - RNA, 19 nt, Homo sapiens
cucgcagccgagagaacag

SEQ ID NO: 4493 - RNA, 19 nt, Homo sapiens
ucucgcagccgagagaaca

SEQ ID NO: 4494 - RNA, 19 nt, Homo sapiens
gucucgcagccgagagaac

SEQ ID NO: 4495 - RNA, 19 nt, Homo sapiens
agucucgcagccgagagaa

SEQ ID NO: 4496 - RNA, 19 nt, Homo sapiens
aagucucgcagccgagaga

SEQ ID NO: 4497 - RNA, 19 nt, Homo sapiens
gaagucucgcagccgagag

SEQ ID NO: 4498 - RNA, 19 nt, Homo sapiens
agaagucucgcagccgaga

SEQ ID NO: 4499 - RNA, 19 nt, Homo sapiens
uagaagucucgcagccgag

SEQ ID NO: 4500 - RNA, 19 nt, Homo sapiens
auagaagucucgcagccga

SEQ ID NO: 4501 - RNA, 19 nt, Homo sapiens
cauagaagucucgcagccg

SEQ ID NO: 4502 - RNA, 19 nt, Homo sapiens
ccauagaagucucgcagcc

SEQ ID NO: 4503 - RNA, 19 nt, Homo sapiens
cccauagaagucucgcagc

SEQ ID NO: 4504 - RNA, 19 nt, Homo sapiens
ccagggugucauccaaccc

SEQ ID NO: 4505 - RNA, 19 nt, Homo sapiens
cugugcccagaaauccgcc

SEQ ID NO: 4506 - RNA, 19 nt, Homo sapiens
gcugugcccagaaauccgc

SEQ ID NO: 4507 - RNA, 19 nt, Homo sapiens
agcugugcccagaaauccg

SEQ ID NO: 4508 - RNA, 19 nt, Homo sapiens
gagcugugcccagaaaucc

SEQ ID NO: 4509 - RNA, 19 nt, Homo sapiens
ggagcugugcccagaaauc

SEQ ID NO: 4510 - RNA, 19 nt, Homo sapiens
aggagcugugcccagaaau

SEQ ID NO: 4511 - RNA, 19 nt, Homo sapiens
caggagcugugcccagaaa

SEQ ID NO: 4512 - RNA, 19 nt, Homo sapiens
ccaggagcugugcccagaa

SEQ ID NO: 4513 - RNA, 19 nt, Homo sapiens
uccaggagcugugcccaga

SEQ ID NO: 4514 - RNA, 19 nt, Homo sapiens
cuccaggagcugugcccag

SEQ ID NO: 4515 - RNA, 19 nt, Homo sapiens
ucuccaggagcugugccca

SEQ ID NO: 4516 - RNA, 19 nt, Homo sapiens
cucuccaggagcugugccc

SEQ ID NO: 4517 - RNA, 19 nt, Homo sapiens
ucucuccaggagcugugcc

SEQ ID NO: 4518 - RNA, 19 nt, Homo sapiens
cucucuccaggagcugugc

SEQ ID NO: 4519 - RNA, 19 nt, Homo sapiens
acucucuccaggagcugug

SEQ ID NO: 4520 - RNA, 19 nt, Homo sapiens
cacucucuccaggagcugu

SEQ ID NO: 4521 - RNA, 19 nt, Homo sapiens
acacucucuccaggagcug

SEQ ID NO: 4522 - RNA, 19 nt, Homo sapiens
aacacucucuccaggagcu

SEQ ID NO: 4523 - RNA, 19 nt, Homo sapiens
gaacacucucuccaggagc

SEQ ID NO: 4524 - RNA, 19 nt, Homo sapiens
ggaacacucucuccaggag

SEQ ID NO: 4525 - RNA, 19 nt, Homo sapiens
gggaacacucucuccagga

SEQ ID NO: 4526 - RNA, 19 nt, Homo sapiens
cgggaacacucucuccagg

SEQ ID NO: 4527 - RNA, 19 nt, Homo sapiens
gcgggaacacucucuccag

SEQ ID NO: 4528 - RNA, 19 nt, Homo sapiens
agcgggaacacucucucca

SEQ ID NO: 4529 - RNA, 19 nt, Homo sapiens
cagcgggaacacucucucc

SEQ ID NO: 4530 - RNA, 19 nt, Homo sapiens
gcagcgggaacacucucuc

SEQ ID NO: 4531 - RNA, 19 nt, Homo sapiens
agcagcgggaacacucucu

SEQ ID NO: 4532 - RNA, 19 nt, Homo sapiens
cagcagcgggaacacucuc

SEQ ID NO: 4533 - RNA, 19 nt, Homo sapiens
gcagcagcgggaacacucu

SEQ ID NO: 4534 - RNA, 19 nt, Homo sapiens
ugcagcagcgggaacacuc

SEQ ID NO: 4535 - RNA, 19 nt, Homo sapiens
gugcagcagcgggaacacu

SEQ ID NO: 4536 - RNA, 19 nt, Homo sapiens
ggugcagcagcgggaacac

SEQ ID NO: 4537 - RNA, 19 nt, Homo sapiens
gggugcagcagcgggaaca

SEQ ID NO: 4538 - RNA, 19 nt, Homo sapiens
ugggugcagcagcgggaac

SEQ ID NO: 4539 - RNA, 19 nt, Homo sapiens
gugggugcagcagcgggaa

SEQ ID NO: 4540 - RNA, 19 nt, Homo sapiens
ugugggugcagcagcggga

SEQ ID NO: 4541 - RNA, 19 nt, Homo sapiens
cugugggugcagcagcggg

SEQ ID NO: 4542 - RNA, 19 nt, Homo sapiens
acugugggugcagcagcgg

SEQ ID NO: 4543 - RNA, 19 nt, Homo sapiens
uacugugggugcagcagcg

SEQ ID NO: 4544 - RNA, 19 nt, Homo sapiens
guacugugggugcagcagc

SEQ ID NO: 4545 - RNA, 19 nt, Homo sapiens
uguacugugggugcagcag

SEQ ID NO: 4546 - RNA, 19 nt, Homo sapiens
cuguacugugggugcagca

SEQ ID NO: 4547 - RNA, 19 nt, Homo sapiens
gcuguacugugggugcagc

SEQ ID NO: 4548 - RNA, 19 nt, Homo sapiens
agcuguacugugggugcag

SEQ ID NO: 4549 - RNA, 19 nt, Homo sapiens
aagcuguacugugggugca

SEQ ID NO: 4550 - RNA, 19 nt, Homo sapiens
gaagcuguacugugggugc

SEQ ID NO: 4551 - RNA, 19 nt, Homo sapiens
ggaagcuguacugugggug

SEQ ID NO: 4552 - RNA, 19 nt, Homo sapiens
gggaagcuguacugugggu

SEQ ID NO: 4553 - RNA, 19 nt, Homo sapiens
gcagagcagguagucaggg

SEQ ID NO: 4554 - RNA, 19 nt, Homo sapiens
ggcagagcagguagucagg

SEQ ID NO: 4555 - RNA, 19 nt, Homo sapiens
aggcagagcagguagucag

SEQ ID NO: 4556 - RNA, 19 nt, Homo sapiens
gaggcagagcagguaguca

SEQ ID NO: 4557 - RNA, 19 nt, Homo sapiens
agaggcagagcagguaguc

SEQ ID NO: 4558 - RNA, 19 nt, Homo sapiens
gagaggcagagcagguagu

SEQ ID NO: 4559 - RNA, 19 nt, Homo sapiens
ugagaggcagagcagguag

SEQ ID NO: 4560 - RNA, 19 nt, Homo sapiens
gugagaggcagagcaggua

SEQ ID NO: 4561 - RNA, 19 nt, Homo sapiens
cgugagaggcagagcaggu

SEQ ID NO: 4562 - RNA, 19 nt, Homo sapiens
gcgugagaggcagagcagg

SEQ ID NO: 4563 - RNA, 19 nt, Homo sapiens
agcgugagaggcagagcag

SEQ ID NO: 4564 - RNA, 19 nt, Homo sapiens
aagcgugagaggcagagca

SEQ ID NO: 4565 - RNA, 19 nt, Homo sapiens
caagcgugagaggcagagc

SEQ ID NO: 4566 - RNA, 19 nt, Homo sapiens
ccaagcgugagaggcagag

SEQ ID NO: 4567 - RNA, 19 nt, Homo sapiens
caaagggcugcagagagcc

SEQ ID NO: 4568 - RNA, 19 nt, Homo sapiens
ccaaagggcugcagagagc

SEQ ID NO: 4569 - RNA, 19 nt, Homo sapiens
cccaaagggcugcagagag

SEQ ID NO: 4570 - RNA, 19 nt, Homo sapiens
ugcaggcggaggcggcggg

SEQ ID NO: 4571 - RNA, 19 nt, Homo sapiens
cugcaggcggaggcggcgg

SEQ ID NO: 4572 - RNA, 19 nt, Homo sapiens
ucugcaggcggaggcggcg

SEQ ID NO: 4573 - RNA, 19 nt, Homo sapiens
aucugcaggcggaggcggc

SEQ ID NO: 4574 - RNA, 19 nt, Homo sapiens
uaucugcaggcggaggcgg

SEQ ID NO: 4575 - RNA, 19 nt, Homo sapiens
uuaucugcaggcggaggcg

SEQ ID NO: 4576 - RNA, 19 nt, Homo sapiens
guuaucugcaggcggaggc

SEQ ID NO: 4577 - RNA, 19 nt, Homo sapiens
gguuaucugcaggcggagg

SEQ ID NO: 4578 - RNA, 19 nt, Homo sapiens
ggguuaucugcaggcggag

SEQ ID NO: 4579 - RNA, 19 nt, Homo sapiens
cggguuaucugcaggcgga

SEQ ID NO: 4580 - RNA, 19 nt, Homo sapiens
ccggguuaucugcaggcgg

SEQ ID NO: 4581 - RNA, 19 nt, Homo sapiens
uccggguuaucugcaggcg

SEQ ID NO: 4582 - RNA, 19 nt, Homo sapiens
guccggguuaucugcaggc

SEQ ID NO: 4583 - RNA, 19 nt, Homo sapiens
gguccggguuaucugcagg

SEQ ID NO: 4584 - RNA, 19 nt, Homo sapiens
ggguccggguuaucugcag

SEQ ID NO: 4585 - RNA, 19 nt, Homo sapiens
aggguccggguuaucugca

SEQ ID NO: 4586 - RNA, 19 nt, Homo sapiens
caggguccggguuaucugc

SEQ ID NO: 4587 - RNA, 19 nt, Homo sapiens
ccaggguccggguuaucug

SEQ ID NO: 4588 - RNA, 19 nt, Homo sapiens
accaggguccggguuaucu

SEQ ID NO: 4589 - RNA, 19 nt, Homo sapiens
caccaggguccggguuauc

SEQ ID NO: 4590 - RNA, 19 nt, Homo sapiens
ccaccaggguccggguuau

SEQ ID NO: 4591 - RNA, 19 nt, Homo sapiens
cacaaaggcucgggcagcc

SEQ ID NO: 4592 - RNA, 19 nt, Homo sapiens
gcacaaaggcucgggcagc

SEQ ID NO: 4593 - RNA, 19 nt, Homo sapiens
ugcacaaaggcucgggcag

SEQ ID NO: 4594 - RNA, 19 nt, Homo sapiens
cugcacaaaggcucgggca

SEQ ID NO: 4595 - RNA, 19 nt, Homo sapiens
ccugcacaaaggcucgggc

SEQ ID NO: 4596 - RNA, 19 nt, Homo sapiens
cccugcacaaaggcucggg

SEQ ID NO: 4597 - RNA, 19 nt, Homo sapiens
gcccugcacaaaggcucgg

SEQ ID NO: 4598 - RNA, 19 nt, Homo sapiens
ggcccugcacaaaggcucg

SEQ ID NO: 4599 - RNA, 19 nt, Homo sapiens
aggcccugcacaaaggcuc

SEQ ID NO: 4600 - RNA, 19 nt, Homo sapiens
caggcccugcacaaaggcu

SEQ ID NO: 4601 - RNA, 19 nt, Homo sapiens
ccaggcccugcacaaaggc

SEQ ID NO: 4602 - RNA, 19 nt, Homo sapiens
uccaggcccugcacaaagg

SEQ ID NO: 4603 - RNA, 19 nt, Homo sapiens
cuccaggcccugcacaaag

SEQ ID NO: 4604 - RNA, 19 nt, Homo sapiens
ucuccaggcccugcacaaa

SEQ ID NO: 4605 - RNA, 19 nt, Homo sapiens
gucuccaggcccugcacaa

SEQ ID NO: 4606 - RNA, 19 nt, Homo sapiens
agucuccaggcccugcaca

SEQ ID NO: 4607 - RNA, 19 nt, Homo sapiens
cagucuccaggcccugcac

SEQ ID NO: 4608 - RNA, 19 nt, Homo sapiens
ccagucuccaggcccugca

SEQ ID NO: 4609 - RNA, 19 nt, Homo sapiens
uccagucuccaggcccugc

SEQ ID NO: 4610 - RNA, 19 nt, Homo sapiens
uuccagucuccaggcccug

SEQ ID NO: 4611 - RNA, 19 nt, Homo sapiens
cuuccagucuccaggcccu

SEQ ID NO: 4612 - RNA, 19 nt, Homo sapiens
ucuuccagucuccaggccc

SEQ ID NO: 4613 - RNA, 19 nt, Homo sapiens
uucuuccagucuccaggcc

SEQ ID NO: 4614 - RNA, 19 nt, Homo sapiens
uuucuuccagucuccaggc

SEQ ID NO: 4615 - RNA, 19 nt, Homo sapiens
auuucuuccagucuccagg

SEQ ID NO: 4616 - RNA, 19 nt, Homo sapiens
cauuucuuccagucuccag

SEQ ID NO: 4617 - RNA, 19 nt, Homo sapiens
acauuucuuccagucucca

SEQ ID NO: 4618 - RNA, 19 nt, Homo sapiens
cacauuucuuccagucucc

SEQ ID NO: 4619 - RNA, 19 nt, Homo sapiens
ccacauuucuuccagucuc

SEQ ID NO: 4620 - RNA, 19 nt, Homo sapiens
accacauuucuuccagucu

SEQ ID NO: 4621 - RNA, 19 nt, Homo sapiens
gaccacauuucuuccaguc

SEQ ID NO: 4622 - RNA, 19 nt, Homo sapiens
ugaccacauuucuuccagu

SEQ ID NO: 4623 - RNA, 19 nt, Homo sapiens
cugaccacauuucuuccag

SEQ ID NO: 4624 - RNA, 19 nt, Homo sapiens
gcugaccacauuucuucca

SEQ ID NO: 4625 - RNA, 19 nt, Homo sapiens
cgcugaccacauuucuucc

SEQ ID NO: 4626 - RNA, 19 nt, Homo sapiens
ucgcugaccacauuucuuc

SEQ ID NO: 4627 - RNA, 19 nt, Homo sapiens
uucgcugaccacauuucuu

SEQ ID NO: 4628 - RNA, 19 nt, Homo sapiens
cuucgcugaccacauuucu

SEQ ID NO: 4629 - RNA, 19 nt, Homo sapiens
gcuucgcugaccacauuuc

SEQ ID NO: 4630 - RNA, 19 nt, Homo sapiens
cgcuucgcugaccacauuu

SEQ ID NO: 4631 - RNA, 19 nt, Homo sapiens
gcgcuucgcugaccacauu

SEQ ID NO: 4632 - RNA, 19 nt, Homo sapiens
agcgcuucgcugaccacau

SEQ ID NO: 4633 - RNA, 19 nt, Homo sapiens
aagcgcuucgcugaccaca

SEQ ID NO: 4634 - RNA, 19 nt, Homo sapiens
uaagcgcuucgcugaccac

SEQ ID NO: 4635 - RNA, 19 nt, Homo sapiens
uuaagcgcuucgcugacca

SEQ ID NO: 4636 - RNA, 19 nt, Homo sapiens
cuuaagcgcuucgcugacc

SEQ ID NO: 4637 - RNA, 19 nt, Homo sapiens
ccuuaagcgcuucgcugac

SEQ ID NO: 4638 - RNA, 19 nt, Homo sapiens
accuuaagcgcuucgcuga

SEQ ID NO: 4639 - RNA, 19 nt, Homo sapiens
caccuuaagcgcuucgcug

SEQ ID NO: 4640 - RNA, 19 nt, Homo sapiens
gcaccuuaagcgcuucgcu

SEQ ID NO: 4641 - RNA, 19 nt, Homo sapiens
ggcaccuuaagcgcuucgc

SEQ ID NO: 4642 - RNA, 19 nt, Homo sapiens
cggcaccuuaagcgcuucg

SEQ ID NO: 4643 - RNA, 19 nt, Homo sapiens
ccggcaccuuaagcgcuuc

SEQ ID NO: 4644 - RNA, 19 nt, Homo sapiens
accggcaccuuaagcgcuu

SEQ ID NO: 4645 - RNA, 19 nt, Homo sapiens
caccggcaccuuaagcgcu

SEQ ID NO: 4646 - RNA, 19 nt, Homo sapiens
acaccggcaccuuaagcgc

SEQ ID NO: 4647 - RNA, 19 nt, Homo sapiens
gacaccggcaccuuaagcg

SEQ ID NO: 4648 - RNA, 19 nt, Homo sapiens
agacaccggcaccuuaagc

SEQ ID NO: 4649 - RNA, 19 nt, Homo sapiens
cagacaccggcaccuuaag

SEQ ID NO: 4650 - RNA, 19 nt, Homo sapiens
ucagacaccggcaccuuaa

SEQ ID NO: 4651 - RNA, 19 nt, Homo sapiens
uucagacaccggcaccuua

SEQ ID NO: 4652 - RNA, 19 nt, Homo sapiens
cuucagacaccggcaccuu

SEQ ID NO: 4653 - RNA, 19 nt, Homo sapiens
ccuucagacaccggcaccu

SEQ ID NO: 4654 - RNA, 19 nt, Homo sapiens
gccuucagacaccggcacc

SEQ ID NO: 4655 - RNA, 19 nt, Homo sapiens
agccuucagacaccggcac

SEQ ID NO: 4656 - RNA, 19 nt, Homo sapiens
cagccuucagacaccggca

SEQ ID NO: 4657 - RNA, 19 nt, Homo sapiens
gcagccuucagacaccggc

SEQ ID NO: 4658 - RNA, 19 nt, Homo sapiens
ugcagccuucagacaccgg

SEQ ID NO: 4659 - RNA, 19 nt, Homo sapiens
cugcagccuucagacaccg

SEQ ID NO: 4660 - RNA, 19 nt, Homo sapiens
gcugcagccuucagacacc

SEQ ID NO: 4661 - RNA, 19 nt, Homo sapiens
ggcugcagccuucagacac

SEQ ID NO: 4662 - RNA, 19 nt, Homo sapiens
gagacgcaucagagccugg

SEQ ID NO: 4663 - RNA, 19 nt, Homo sapiens
ugagacgcaucagagccug

SEQ ID NO: 4664 - RNA, 19 nt, Homo sapiens
augagacgcaucagagccu

SEQ ID NO: 4665 - RNA, 19 nt, Homo sapiens
gaugagacgcaucagagcc

SEQ ID NO: 4666 - RNA, 19 nt, Homo sapiens
cgaugagacgcaucagagc

SEQ ID NO: 4667 - RNA, 19 nt, Homo sapiens
ccgaugagacgcaucagag

SEQ ID NO: 4668 - RNA, 19 nt, Homo sapiens
gccgaugagacgcaucaga

SEQ ID NO: 4669 - RNA, 19 nt, Homo sapiens
agccgaugagacgcaucag

SEQ ID NO: 4670 - RNA, 19 nt, Homo sapiens
cagccgaugagacgcauca

SEQ ID NO: 4671 - RNA, 19 nt, Homo sapiens
acagccgaugagacgcauc

SEQ ID NO: 4672 - RNA, 19 nt, Homo sapiens
gacagccgaugagacgcau

SEQ ID NO: 4673 - RNA, 19 nt, Homo sapiens
ggacagccgaugagacgca

SEQ ID NO: 4674 - RNA, 19 nt, Homo sapiens
gggacagccgaugagacgc

SEQ ID NO: 4675 - RNA, 19 nt, Homo sapiens
ggcagggcauaagugaggg

SEQ ID NO: 4676 - RNA, 19 nt, Homo sapiens
guugaggcagaagcccugg

SEQ ID NO: 4677 - RNA, 19 nt, Homo sapiens
cguugaggcagaagcccug

SEQ ID NO: 4678 - RNA, 19 nt, Homo sapiens
acguugaggcagaagcccu

SEQ ID NO: 4679 - RNA, 19 nt, Homo sapiens
cacguugaggcagaagccc

SEQ ID NO: 4680 - RNA, 19 nt, Homo sapiens
ccacguugaggcagaagcc

SEQ ID NO: 4681 - RNA, 19 nt, Homo sapiens
accacguugaggcagaagc

SEQ ID NO: 4682 - RNA, 19 nt, Homo sapiens
aaccacguugaggcagaag

SEQ ID NO: 4683 - RNA, 19 nt, Homo sapiens
gaaccacguugaggcagaa

SEQ ID NO: 4684 - RNA, 19 nt, Homo sapiens
cgaaccacguugaggcaga

SEQ ID NO: 4685 - RNA, 19 nt, Homo sapiens
acgaaccacguugaggcag

SEQ ID NO: 4686 - RNA, 19 nt, Homo sapiens
cacgaaccacguugaggca

SEQ ID NO: 4687 - RNA, 19 nt, Homo sapiens
ccacgaaccacguugaggc

SEQ ID NO: 4688 - RNA, 19 nt, Homo sapiens
cccugcugcugagacagcc

SEQ ID NO: 4689 - RNA, 19 nt, Homo sapiens
ccagucaggcuccaguccc

SEQ ID NO: 4690 - RNA, 19 nt, Homo sapiens
cccagucaggcuccagucc

SEQ ID NO: 4691 - RNA, 19 nt, Homo sapiens
accauccagauaguugccc

SEQ ID NO: 4692 - RNA, 19 nt, Homo sapiens
gaccauccagauaguugcc

SEQ ID NO: 4693 - RNA, 19 nt, Homo sapiens
agaccauccagauaguugc

SEQ ID NO: 4694 - RNA, 19 nt, Homo sapiens
gagaccauccagauaguug

SEQ ID NO: 4695 - RNA, 19 nt, Homo sapiens
ggagaccauccagauaguu

SEQ ID NO: 4696 - RNA, 19 nt, Homo sapiens
aggagaccauccagauagu

SEQ ID NO: 4697 - RNA, 19 nt, Homo sapiens
caggagaccauccagauag

SEQ ID NO: 4698 - RNA, 19 nt, Homo sapiens
ucaggagaccauccagaua

SEQ ID NO: 4699 - RNA, 19 nt, Homo sapiens
aucaggagaccauccagau

SEQ ID NO: 4700 - RNA, 19 nt, Homo sapiens
gaucaggagaccauccaga

SEQ ID NO: 4701 - RNA, 19 nt, Homo sapiens
ggaucaggagaccauccag

SEQ ID NO: 4702 - RNA, 19 nt, Homo sapiens
aggaucaggagaccaucca

SEQ ID NO: 4703 - RNA, 19 nt, Homo sapiens
caggaucaggagaccaucc

SEQ ID NO: 4704 - RNA, 19 nt, Homo sapiens
ccaggaucaggagaccauc

SEQ ID NO: 4705 - RNA, 19 nt, Homo sapiens
gcccuggagcuuaucagcc

SEQ ID NO: 4706 - RNA, 19 nt, Homo sapiens
ggcccuggagcuuaucagc

SEQ ID NO: 4707 - RNA, 19 nt, Homo sapiens
gggcccuggagcuuaucag

SEQ ID NO: 4708 - RNA, 19 nt, Homo sapiens
gccgucagcucaaaggaaa

SEQ ID NO: 4709 - RNA, 19 nt, Homo sapiens
ggccgucagcucaaaggaa

SEQ ID NO: 4710 - RNA, 19 nt, Homo sapiens
cggccgucagcucaaagga

SEQ ID NO: 4711 - RNA, 19 nt, Homo sapiens
ucggccgucagcucaaagg

SEQ ID NO: 4712 - RNA, 19 nt, Homo sapiens
cucggccgucagcucaaag

SEQ ID NO: 4713 - RNA, 19 nt, Homo sapiens
acucggccgucagcucaaa

SEQ ID NO: 4714 - RNA, 19 nt, Homo sapiens
gacucggccgucagcucaa

SEQ ID NO: 4715 - RNA, 19 nt, Homo sapiens
ggacucggccgucagcuca

SEQ ID NO: 4716 - RNA, 19 nt, Homo sapiens
uggacucggccgucagcuc

SEQ ID NO: 4717 - RNA, 19 nt, Homo sapiens
auggacucggccgucagcu

SEQ ID NO: 4718 - RNA, 19 nt, Homo sapiens
aauggacucggccgucagc

SEQ ID NO: 4719 - RNA, 19 nt, Homo sapiens
caauggacucggccgucag

SEQ ID NO: 4720 - RNA, 19 nt, Homo sapiens
ccaauggacucggccguca

SEQ ID NO: 4721 - RNA, 19 nt, Homo sapiens
cccaauggacucggccguc

SEQ ID NO: 4722 - RNA, 19 nt, Homo sapiens
cccuccgagaucuucaccc

SEQ ID NO: 4723 - RNA, 19 nt, Homo sapiens
acccuccgagaucuucacc

SEQ ID NO: 4724 - RNA, 19 nt, Homo sapiens
aacccuccgagaucuucac

SEQ ID NO: 4725 - RNA, 19 nt, Homo sapiens
aaacccuccgagaucuuca

SEQ ID NO: 4726 - RNA, 19 nt, Homo sapiens
caaacccuccgagaucuuc

SEQ ID NO: 4727 - RNA, 19 nt, Homo sapiens
ucaaacccuccgagaucuu

SEQ ID NO: 4728 - RNA, 19 nt, Homo sapiens
aucaaacccuccgagaucu

SEQ ID NO: 4729 - RNA, 19 nt, Homo sapiens
caucaaacccuccgagauc

SEQ ID NO: 4730 - RNA, 19 nt, Homo sapiens
acaucaaacccuccgagau

SEQ ID NO: 4731 - RNA, 19 nt, Homo sapiens
uacaucaaacccuccgaga

SEQ ID NO: 4732 - RNA, 19 nt, Homo sapiens
guacaucaaacccuccgag

SEQ ID NO: 4733 - RNA, 19 nt, Homo sapiens
gguacaucaaacccuccga

SEQ ID NO: 4734 - RNA, 19 nt, Homo sapiens
agguacaucaaacccuccg

SEQ ID NO: 4735 - RNA, 19 nt, Homo sapiens
cagguacaucaaacccucc

SEQ ID NO: 4736 - RNA, 19 nt, Homo sapiens
gcagguacaucaaacccuc

SEQ ID NO: 4737 - RNA, 19 nt, Homo sapiens
ugcagguacaucaaacccu

SEQ ID NO: 4738 - RNA, 19 nt, Homo sapiens
cugcagguacaucaaaccc

SEQ ID NO: 4739 - RNA, 19 nt, Homo sapiens
ccugcagguacaucaaacc

SEQ ID NO: 4740 - RNA, 19 nt, Homo sapiens
uccugcagguacaucaaac

SEQ ID NO: 4741 - RNA, 19 nt, Homo sapiens
uuccugcagguacaucaaa

SEQ ID NO: 4742 - RNA, 19 nt, Homo sapiens
uuuccugcagguacaucaa

SEQ ID NO: 4743 - RNA, 19 nt, Homo sapiens
ggacaccuucgcacuguuu

SEQ ID NO: 4744 - RNA, 19 nt, Homo sapiens
cggacaccuucgcacuguu

SEQ ID NO: 4745 - RNA, 19 nt, Homo sapiens
gcggacaccuucgcacugu

SEQ ID NO: 4746 - RNA, 19 nt, Homo sapiens
ggcggacaccuucgcacug

SEQ ID NO: 4747 - RNA, 19 nt, Homo sapiens
gggcggacaccuucgcacu

SEQ ID NO: 4748 - RNA, 19 nt, Homo sapiens
ugggcggacaccuucgcac

SEQ ID NO: 4749 - RNA, 19 nt, Homo sapiens
cugggcggacaccuucgca

SEQ ID NO: 4750 - RNA, 19 nt, Homo sapiens
ccugggcggacaccuucgc

SEQ ID NO: 4751 - RNA, 19 nt, Homo sapiens
accugggcggacaccuucg

SEQ ID NO: 4752 - RNA, 19 nt, Homo sapiens
caccugggcggacaccuuc

SEQ ID NO: 4753 - RNA, 19 nt, Homo sapiens
acaccugggcggacaccuu

SEQ ID NO: 4754 - RNA, 19 nt, Homo sapiens
aacaccugggcggacaccu

SEQ ID NO: 4755 - RNA, 19 nt, Homo sapiens
aaacaccugggcggacacc

SEQ ID NO: 4756 - RNA, 19 nt, Homo sapiens
gaaacaccugggcggacac

SEQ ID NO: 4757 - RNA, 19 nt, Homo sapiens
ugaaacaccugggcggaca

SEQ ID NO: 4758 - RNA, 19 nt, Homo sapiens
cugaaacaccugggcggac

SEQ ID NO: 4759 - RNA, 19 nt, Homo sapiens
ccugaaacaccugggcgga

SEQ ID NO: 4760 - RNA, 19 nt, Homo sapiens
uccugaaacaccugggcgg

SEQ ID NO: 4761 - RNA, 19 nt, Homo sapiens
cuccugaaacaccugggcg

SEQ ID NO: 4762 - RNA, 19 nt, Homo sapiens
acuccugaaacaccugggc

SEQ ID NO: 4763 - RNA, 19 nt, Homo sapiens
cacuccugaaacaccuggg

SEQ ID NO: 4764 - RNA, 19 nt, Homo sapiens
gcacuccugaaacaccugg

SEQ ID NO: 4765 - RNA, 19 nt, Homo sapiens
cgcacuccugaaacaccug

SEQ ID NO: 4766 - RNA, 19 nt, Homo sapiens
ccgcacuccugaaacaccu

SEQ ID NO: 4767 - RNA, 19 nt, Homo sapiens
gccgcacuccugaaacacc

SEQ ID NO: 4768 - RNA, 19 nt, Homo sapiens
ggccgcacuccugaaacac

SEQ ID NO: 4769 - RNA, 19 nt, Homo sapiens
gggccgcacuccugaaaca

SEQ ID NO: 4770 - RNA, 19 nt, Homo sapiens
gggcaggcaccgggucggg

SEQ ID NO: 4771 - RNA, 19 nt, Homo sapiens
cgggcaggcaccgggucgg

SEQ ID NO: 4772 - RNA, 19 nt, Homo sapiens
gcgggcaggcaccgggucg

SEQ ID NO: 4773 - RNA, 19 nt, Homo sapiens
ugcgggcaggcaccggguc

SEQ ID NO: 4774 - RNA, 19 nt, Homo sapiens
uugcgggcaggcaccgggu

SEQ ID NO: 4775 - RNA, 19 nt, Homo sapiens
guugcgggcaggcaccggg

SEQ ID NO: 4776 - RNA, 19 nt, Homo sapiens
gguugcgggcaggcaccgg

SEQ ID NO: 4777 - RNA, 19 nt, Homo sapiens
cgguugcgggcaggcaccg

SEQ ID NO: 4778 - RNA, 19 nt, Homo sapiens
acgguugcgggcaggcacc

SEQ ID NO: 4779 - RNA, 19 nt, Homo sapiens
gacgguugcgggcaggcac

SEQ ID NO: 4780 - RNA, 19 nt, Homo sapiens
cgacgguugcgggcaggca

SEQ ID NO: 4781 - RNA, 19 nt, Homo sapiens
ucgacgguugcgggcaggc

SEQ ID NO: 4782 - RNA, 19 nt, Homo sapiens
cucgacgguugcgggcagg

SEQ ID NO: 4783 - RNA, 19 nt, Homo sapiens
gcucgacgguugcgggcag

SEQ ID NO: 4784 - RNA, 19 nt, Homo sapiens
ggcucgacgguugcgggca

SEQ ID NO: 4785 - RNA, 19 nt, Homo sapiens
gggcucgacgguugcgggc

SEQ ID NO: 4786 - RNA, 19 nt, Homo sapiens
cggcccgccucuucccggg

SEQ ID NO: 4787 - RNA, 19 nt, Homo sapiens
ccggcccgccucuucccgg

SEQ ID NO: 4788 - RNA, 19 nt, Homo sapiens
gccggcccgccucuucccg

SEQ ID NO: 4789 - RNA, 19 nt, Homo sapiens
agccggcccgccucuuccc

SEQ ID NO: 4790 - RNA, 19 nt, Homo sapiens
cagccggcccgccucuucc

SEQ ID NO: 4791 - RNA, 19 nt, Homo sapiens
acagccggcccgccucuuc

SEQ ID NO: 4792 - RNA, 19 nt, Homo sapiens
cacagccggcccgccucuu

SEQ ID NO: 4793 - RNA, 19 nt, Homo sapiens
ccacagccggcccgccucu

SEQ ID NO: 4794 - RNA, 19 nt, Homo sapiens
accacagccggcccgccuc

SEQ ID NO: 4795 - RNA, 19 nt, Homo sapiens
gaccacagccggcccgccu

SEQ ID NO: 4796 - RNA, 19 nt, Homo sapiens
cgaccacagccggcccgcc

SEQ ID NO: 4797 - RNA, 19 nt, Homo sapiens
ucgaccacagccggcccgc

SEQ ID NO: 4798 - RNA, 19 nt, Homo sapiens
aucgaccacagccggcccg

SEQ ID NO: 4799 - RNA, 19 nt, Homo sapiens
caucgaccacagccggccc

SEQ ID NO: 4800 - RNA, 19 nt, Homo sapiens
ccaucgaccacagccggcc

SEQ ID NO: 4801 - RNA, 19 nt, Homo sapiens
accaucgaccacagccggc

SEQ ID NO: 4802 - RNA, 19 nt, Homo sapiens
caccaucgaccacagccgg

SEQ ID NO: 4803 - RNA, 19 nt, Homo sapiens
ucaccaucgaccacagccg

SEQ ID NO: 4804 - RNA, 19 nt, Homo sapiens
gucaccaucgaccacagcc

SEQ ID NO: 4805 - RNA, 19 nt, Homo sapiens
ggucaccaucgaccacagc

SEQ ID NO: 4806 - RNA, 19 nt, Homo sapiens
cggucaccaucgaccacag

SEQ ID NO: 4807 - RNA, 19 nt, Homo sapiens
ucggucaccaucgaccaca

SEQ ID NO: 4808 - RNA, 19 nt, Homo sapiens
cucggucaccaucgaccac

SEQ ID NO: 4809 - RNA, 19 nt, Homo sapiens
ccucggucaccaucgacca

SEQ ID NO: 4810 - RNA, 19 nt, Homo sapiens
uccucggucaccaucgacc

SEQ ID NO: 4811 - RNA, 19 nt, Homo sapiens
cuccucggucaccaucgac

SEQ ID NO: 4812 - RNA, 19 nt, Homo sapiens
ccuccucggucaccaucga

SEQ ID NO: 4813 - RNA, 19 nt, Homo sapiens
uccuccucggucaccaucg

SEQ ID NO: 4814 - RNA, 19 nt, Homo sapiens
cuccuccucggucaccauc

SEQ ID NO: 4815 - RNA, 19 nt, Homo sapiens
gcuccuccucggucaccau

SEQ ID NO: 4816 - RNA, 19 nt, Homo sapiens
cgcuccuccucggucacca

SEQ ID NO: 4817 - RNA, 19 nt, Homo sapiens
ccgcuccuccucggucacc

SEQ ID NO: 4818 - RNA, 19 nt, Homo sapiens
gccgcuccuccucggucac

SEQ ID NO: 4819 - RNA, 19 nt, Homo sapiens
ggccgcuccuccucgguca

SEQ ID NO: 4820 - RNA, 19 nt, Homo sapiens
gggccgcuccuccucgguc

SEQ ID NO: 4821 - RNA, 19 nt, Homo sapiens
ugggccgcuccuccucggu

SEQ ID NO: 4822 - RNA, 19 nt, Homo sapiens
gugggccgcuccuccucgg

SEQ ID NO: 4823 - RNA, 19 nt, Homo sapiens
cgugggccgcuccuccucg

SEQ ID NO: 4824 - RNA, 19 nt, Homo sapiens
ucgugggccgcuccuccuc

SEQ ID NO: 4825 - RNA, 19 nt, Homo sapiens
gucgugggccgcuccuccu

SEQ ID NO: 4826 - RNA, 19 nt, Homo sapiens
cgucgugggccgcuccucc

SEQ ID NO: 4827 - RNA, 19 nt, Homo sapiens
ccgucgugggccgcuccuc

SEQ ID NO: 4828 - RNA, 19 nt, Homo sapiens
gccgucgugggccgcuccu

SEQ ID NO: 4829 - RNA, 19 nt, Homo sapiens
ggccgucgugggccgcucc

SEQ ID NO: 4830 - RNA, 19 nt, Homo sapiens
cggccgucgugggccgcuc

SEQ ID NO: 4831 - RNA, 19 nt, Homo sapiens
gcggccgucgugggccgcu

SEQ ID NO: 4832 - RNA, 19 nt, Homo sapiens
ugcggccgucgugggccgc

SEQ ID NO: 4833 - RNA, 19 nt, Homo sapiens
cugcggccgucgugggccg

SEQ ID NO: 4834 - RNA, 19 nt, Homo sapiens
ccugcggccgucgugggcc

SEQ ID NO: 4835 - RNA, 19 nt, Homo sapiens
gccugcggccgucgugggc

SEQ ID NO: 4836 - RNA, 19 nt, Homo sapiens
ugccugcggccgucguggg

SEQ ID NO: 4837 - RNA, 19 nt, Homo sapiens
gugccugcggccgucgugg

SEQ ID NO: 4838 - RNA, 19 nt, Homo sapiens
ggugccugcggccgucgug

SEQ ID NO: 4839 - RNA, 19 nt, Homo sapiens
uggugccugcggccgucgu

SEQ ID NO: 4840 - RNA, 19 nt, Homo sapiens
uuggugccugcggccgucg

SEQ ID NO: 4841 - RNA, 19 nt, Homo sapiens
guuggugccugcggccguc

SEQ ID NO: 4842 - RNA, 19 nt, Homo sapiens
gguuggugccugcggccgu

SEQ ID NO: 4843 - RNA, 19 nt, Homo sapiens
agguuggugccugcggccg

SEQ ID NO: 4844 - RNA, 19 nt, Homo sapiens
cagguuggugccugcggcc

SEQ ID NO: 4845 - RNA, 19 nt, Homo sapiens
gcagguuggugccugcggc

SEQ ID NO: 4846 - RNA, 19 nt, Homo sapiens
ugcagguuggugccugcgg

SEQ ID NO: 4847 - RNA, 19 nt, Homo sapiens
gugcagguuggugccugcg

SEQ ID NO: 4848 - RNA, 19 nt, Homo sapiens
ggugcagguuggugccugc

SEQ ID NO: 4849 - RNA, 19 nt, Homo sapiens
cggugcagguuggugccug

SEQ ID NO: 4850 - RNA, 19 nt, Homo sapiens
ccggugcagguuggugccu

SEQ ID NO: 4851 - RNA, 19 nt, Homo sapiens
gccggugcagguuggugcc

SEQ ID NO: 4852 - RNA, 19 nt, Homo sapiens
agccggugcagguuggugc

SEQ ID NO: 4853 - RNA, 19 nt, Homo sapiens
cagccggugcagguuggug

SEQ ID NO: 4854 - RNA, 19 nt, Homo sapiens
ccagccggugcagguuggu

SEQ ID NO: 4855 - RNA, 19 nt, Homo sapiens
accagccggugcagguugg

SEQ ID NO: 4856 - RNA, 19 nt, Homo sapiens
caccagccggugcagguug

SEQ ID NO: 4857 - RNA, 19 nt, Homo sapiens
acaccagccggugcagguu

SEQ ID NO: 4858 - RNA, 19 nt, Homo sapiens
cacaccagccggugcaggu

SEQ ID NO: 4859 - RNA, 19 nt, Homo sapiens
ccacaccagccggugcagg

SEQ ID NO: 4860 - RNA, 19 nt, Homo sapiens
cccacaccagccggugcag

SEQ ID NO: 4861 - RNA, 19 nt, Homo sapiens
ucccacaccagccggugca

SEQ ID NO: 4862 - RNA, 19 nt, Homo sapiens
cucccacaccagccggugc

SEQ ID NO: 4863 - RNA, 19 nt, Homo sapiens
gcucccacaccagccggug

SEQ ID NO: 4864 - RNA, 19 nt, Homo sapiens
agcucccacaccagccggu

SEQ ID NO: 4865 - RNA, 19 nt, Homo sapiens
gagcucccacaccagccgg

SEQ ID NO: 4866 - RNA, 19 nt, Homo sapiens
ggagcucccacaccagccg

SEQ ID NO: 4867 - RNA, 19 nt, Homo sapiens
cggagcucccacaccagcc

SEQ ID NO: 4868 - RNA, 19 nt, Homo sapiens
gcggagcucccacaccagc

SEQ ID NO: 4869 - RNA, 19 nt, Homo sapiens
cgcggagcucccacaccag

SEQ ID NO: 4870 - RNA, 19 nt, Homo sapiens
ucgcggagcucccacacca

SEQ ID NO: 4871 - RNA, 19 nt, Homo sapiens
cucgcggagcucccacacc

SEQ ID NO: 4872 - RNA, 19 nt, Homo sapiens
gcucgcggagcucccacac

SEQ ID NO: 4873 - RNA, 19 nt, Homo sapiens
cgcucgcggagcucccaca

SEQ ID NO: 4874 - RNA, 19 nt, Homo sapiens
acgcucgcggagcucccac

SEQ ID NO: 4875 - RNA, 19 nt, Homo sapiens
gacgcucgcggagcuccca

SEQ ID NO: 4876 - RNA, 19 nt, Homo sapiens
agacgcucgcggagcuccc

SEQ ID NO: 4877 - RNA, 19 nt, Homo sapiens
cagacgcucgcggagcucc

SEQ ID NO: 4878 - RNA, 19 nt, Homo sapiens
ccagacgcucgcggagcuc

SEQ ID NO: 4879 - RNA, 19 nt, Homo sapiens
cagccgggcccagaagccc

SEQ ID NO: 4880 - RNA, 19 nt, Homo sapiens
acagccgggcccagaagcc

SEQ ID NO: 4881 - RNA, 19 nt, Homo sapiens
gacagccgggcccagaagc

SEQ ID NO: 4882 - RNA, 19 nt, Homo sapiens
ggacagccgggcccagaag

SEQ ID NO: 4883 - RNA, 19 nt, Homo sapiens
gggacagccgggcccagaa

SEQ ID NO: 4884 - RNA, 19 nt, Homo sapiens
agggacagccgggcccaga

SEQ ID NO: 4885 - RNA, 19 nt, Homo sapiens
cagggacagccgggcccag

SEQ ID NO: 4886 - RNA, 19 nt, Homo sapiens
ucagggacagccgggccca

SEQ ID NO: 4887 - RNA, 19 nt, Homo sapiens
gucagggacagccgggccc

SEQ ID NO: 4888 - RNA, 19 nt, Homo sapiens
cgucagggacagccgggcc

SEQ ID NO: 4889 - RNA, 19 nt, Homo sapiens
ccgucagggacagccgggc

SEQ ID NO: 4890 - RNA, 19 nt, Homo sapiens
accgucagggacagccggg

SEQ ID NO: 4891 - RNA, 19 nt, Homo sapiens
caccgucagggacagccgg

SEQ ID NO: 4892 - RNA, 19 nt, Homo sapiens
acaccgucagggacagccg

SEQ ID NO: 4893 - RNA, 19 nt, Homo sapiens
cacaccgucagggacagcc

SEQ ID NO: 4894 - RNA, 19 nt, Homo sapiens
gcacaccgucagggacagc

SEQ ID NO: 4895 - RNA, 19 nt, Homo sapiens
cgcacaccgucagggacag

SEQ ID NO: 4896 - RNA, 19 nt, Homo sapiens
ccgcacaccgucagggaca

SEQ ID NO: 4897 - RNA, 19 nt, Homo sapiens
uccgcacaccgucagggac

SEQ ID NO: 4898 - RNA, 19 nt, Homo sapiens
cuccgcacaccgucaggga

SEQ ID NO: 4899 - RNA, 19 nt, Homo sapiens
ucuccgcacaccgucaggg

SEQ ID NO: 4900 - RNA, 19 nt, Homo sapiens
gucuccgcacaccgucagg

SEQ ID NO: 4901 - RNA, 19 nt, Homo sapiens
agucuccgcacaccgucag

SEQ ID NO: 4902 - RNA, 19 nt, Homo sapiens
gagucuccgcacaccguca

SEQ ID NO: 4903 - RNA, 19 nt, Homo sapiens
agagucuccgcacaccguc

SEQ ID NO: 4904 - RNA, 19 nt, Homo sapiens
gagagucuccgcacaccgu

SEQ ID NO: 4905 - RNA, 19 nt, Homo sapiens
cgagagucuccgcacaccg

SEQ ID NO: 4906 - RNA, 19 nt, Homo sapiens
gcgagagucuccgcacacc

SEQ ID NO: 4907 - RNA, 19 nt, Homo sapiens
ugcgagagucuccgcacac

SEQ ID NO: 4908 - RNA, 19 nt, Homo sapiens
augcgagagucuccgcaca

SEQ ID NO: 4909 - RNA, 19 nt, Homo sapiens
caugcgagagucuccgcac

SEQ ID NO: 4910 - RNA, 19 nt, Homo sapiens
ccaugcgagagucuccgca

SEQ ID NO: 4911 - RNA, 19 nt, Homo sapiens
cagcgaggcguccgcugcc

SEQ ID NO: 4912 - RNA, 19 nt, Homo sapiens
ccagcgaggcguccgcugc

SEQ ID NO: 4913 - RNA, 19 nt, Homo sapiens
uccagcgaggcguccgcug

SEQ ID NO: 4914 - RNA, 19 nt, Homo sapiens
cuccagcgaggcguccgcu

SEQ ID NO: 4915 - RNA, 19 nt, Homo sapiens
ccuccagcgaggcguccgc

SEQ ID NO: 4916 - RNA, 19 nt, Homo sapiens
gccuccagcgaggcguccg

SEQ ID NO: 4917 - RNA, 19 nt, Homo sapiens
cgccuccagcgaggcgucc

SEQ ID NO: 4918 - RNA, 19 nt, Homo sapiens
ccgccuccagcgaggcguc

SEQ ID NO: 4919 - RNA, 19 nt, Homo sapiens
gccgccuccagcgaggcgu

SEQ ID NO: 4920 - RNA, 19 nt, Homo sapiens
cgccgccuccagcgaggcg

SEQ ID NO: 4921 - RNA, 19 nt, Homo sapiens
gcgccgccuccagcgaggc

SEQ ID NO: 4922 - RNA, 19 nt, Homo sapiens
ggcgccgccuccagcgagg

SEQ ID NO: 4923 - RNA, 19 nt, Homo sapiens
gggcgccgccuccagcgag

SEQ ID NO: 4924 - RNA, 19 nt, Homo sapiens
agggcgccgccuccagcga

SEQ ID NO: 4925 - RNA, 19 nt, Homo sapiens
cagggcgccgccuccagcg

SEQ ID NO: 4926 - RNA, 19 nt, Homo sapiens
gcagggcgccgccuccagc

SEQ ID NO: 4927 - RNA, 19 nt, Homo sapiens
agcagggcgccgccuccag

SEQ ID NO: 4928 - RNA, 19 nt, Homo sapiens
cagcagggcgccgccucca

SEQ ID NO: 4929 - RNA, 19 nt, Homo sapiens
ccagcagggcgccgccucc

SEQ ID NO: 4930 - RNA, 19 nt, Homo sapiens
uccagcagggcgccgccuc

SEQ ID NO: 4931 - RNA, 19 nt, Homo sapiens
guccagcagggcgccgccu

SEQ ID NO: 4932 - RNA, 19 nt, Homo sapiens
gguccagcagggcgccgcc

SEQ ID NO: 4933 - RNA, 19 nt, Homo sapiens
cgguccagcagggcgccgc

SEQ ID NO: 4934 - RNA, 19 nt, Homo sapiens
ccgguccagcagggcgccg

SEQ ID NO: 4935 - RNA, 19 nt, Homo sapiens
uccgguccagcagggcgcc

SEQ ID NO: 4936 - RNA, 19 nt, Homo sapiens
cuccgguccagcagggcgc

SEQ ID NO: 4937 - RNA, 19 nt, Homo sapiens
gcuccgguccagcagggcg

SEQ ID NO: 4938 - RNA, 19 nt, Homo sapiens
ggcuccgguccagcagggc

SEQ ID NO: 4939 - RNA, 19 nt, Homo sapiens
cggcuccgguccagcaggg

SEQ ID NO: 4940 - RNA, 19 nt, Homo sapiens
ccggcuccgguccagcagg

SEQ ID NO: 4941 - RNA, 19 nt, Homo sapiens
cccggcuccgguccagcag

SEQ ID NO: 4942 - RNA, 19 nt, Homo sapiens
gcccggcuccgguccagca

SEQ ID NO: 4943 - RNA, 19 nt, Homo sapiens
cgcccggcuccgguccagc

SEQ ID NO: 4944 - RNA, 19 nt, Homo sapiens
ccgcccggcuccgguccag

SEQ ID NO: 4945 - RNA, 19 nt, Homo sapiens
cccgcccggcuccggucca

SEQ ID NO: 4946 - RNA, 19 nt, Homo sapiens
guugaccugcucggccggg

SEQ ID NO: 4947 - RNA, 19 nt, Homo sapiens
uguugaccugcucggccgg

SEQ ID NO: 4948 - RNA, 19 nt, Homo sapiens
uuguugaccugcucggccg

SEQ ID NO: 4949 - RNA, 19 nt, Homo sapiens
guuguugaccugcucggcc

SEQ ID NO: 4950 - RNA, 19 nt, Homo sapiens
gguuguugaccugcucggc

SEQ ID NO: 4951 - RNA, 19 nt, Homo sapiens
ggguuguugaccugcucgg

SEQ ID NO: 4952 - RNA, 19 nt, Homo sapiens
cguccaccuugagcucggg

SEQ ID NO: 4953 - RNA, 19 nt, Homo sapiens
gcguccaccuugagcucgg

SEQ ID NO: 4954 - RNA, 19 nt, Homo sapiens
ggcguccaccuugagcucg

SEQ ID NO: 4955 - RNA, 19 nt, Homo sapiens
aggcguccaccuugagcuc

SEQ ID NO: 4956 - RNA, 19 nt, Homo sapiens
gaggcguccaccuugagcu

SEQ ID NO: 4957 - RNA, 19 nt, Homo sapiens
cgaggcguccaccuugagc

SEQ ID NO: 4958 - RNA, 19 nt, Homo sapiens
ccgaggcguccaccuugag

SEQ ID NO: 4959 - RNA, 19 nt, Homo sapiens
cccgaggcguccaccuuga

SEQ ID NO: 4960 - RNA, 19 nt, Homo sapiens
gcccgaggcguccaccuug

SEQ ID NO: 4961 - RNA, 19 nt, Homo sapiens
ggcccgaggcguccaccuu

SEQ ID NO: 4962 - RNA, 19 nt, Homo sapiens
gggcccgaggcguccaccu

SEQ ID NO: 4963 - RNA, 19 nt, Homo sapiens
gccgugucgggacaucggg

SEQ ID NO: 4964 - RNA, 19 nt, Homo sapiens
cgccgugucgggacaucgg

SEQ ID NO: 4965 - RNA, 19 nt, Homo sapiens
ccgccgugucgggacaucg

SEQ ID NO: 4966 - RNA, 19 nt, Homo sapiens
gccgccgugucgggacauc

SEQ ID NO: 4967 - RNA, 19 nt, Homo sapiens
cgccgccgugucgggacau

SEQ ID NO: 4968 - RNA, 19 nt, Homo sapiens
acgccgccgugucgggaca

SEQ ID NO: 4969 - RNA, 19 nt, Homo sapiens
gacgccgccgugucgggac

SEQ ID NO: 4970 - RNA, 19 nt, Homo sapiens
cgacgccgccgugucggga

SEQ ID NO: 4971 - RNA, 19 nt, Homo sapiens
ccgacgccgccgugucggg

SEQ ID NO: 4972 - RNA, 19 nt, Homo sapiens
gccgacgccgccgugucgg

SEQ ID NO: 4973 - RNA, 19 nt, Homo sapiens
agccgacgccgccgugucg

SEQ ID NO: 4974 - RNA, 19 nt, Homo sapiens
uagccgacgccgccguguc

SEQ ID NO: 4975 - RNA, 19 nt, Homo sapiens
guagccgacgccgccgugu

SEQ ID NO: 4976 - RNA, 19 nt, Homo sapiens
uguagccgacgccgccgug

SEQ ID NO: 4977 - RNA, 19 nt, Homo sapiens
cuguagccgacgccgccgu

SEQ ID NO: 4978 - RNA, 19 nt, Homo sapiens
gcuguagccgacgccgccg

SEQ ID NO: 4979 - RNA, 19 nt, Homo sapiens
agcuguagccgacgccgcc

SEQ ID NO: 4980 - RNA, 19 nt, Homo sapiens
gagcuguagccgacgccgc

SEQ ID NO: 4981 - RNA, 19 nt, Homo sapiens
ggagcuguagccgacgccg

SEQ ID NO: 4982 - RNA, 19 nt, Homo sapiens
cggagcuguagccgacgcc

SEQ ID NO: 4983 - RNA, 19 nt, Homo sapiens
ccggagcuguagccgacgc

SEQ ID NO: 4984 - RNA, 19 nt, Homo sapiens
cccggagcuguagccgacg

SEQ ID NO: 4985 - RNA, 19 nt, Homo sapiens
gcccggagcuguagccgac

SEQ ID NO: 4986 - RNA, 19 nt, Homo sapiens
cgcccggagcuguagccga

SEQ ID NO: 4987 - RNA, 19 nt, Homo sapiens
ccgcccggagcuguagccg

SEQ ID NO: 4988 - RNA, 19 nt, Homo sapiens
gccgcccggagcuguagcc

SEQ ID NO: 4989 - RNA, 19 nt, Homo sapiens
ggccgcccggagcuguagc

SEQ ID NO: 4990 - RNA, 19 nt, Homo sapiens
ugucccagugcggccguuu

SEQ ID NO: 4991 - RNA, 19 nt, Homo sapiens
gugucccagugcggccguu

SEQ ID NO: 4992 - RNA, 19 nt, Homo sapiens
cgugucccagugcggccgu

SEQ ID NO: 4993 - RNA, 19 nt, Homo sapiens
ucgugucccagugcggccg

SEQ ID NO: 4994 - RNA, 19 nt, Homo sapiens
gucgugucccagugcggcc

SEQ ID NO: 4995 - RNA, 19 nt, Homo sapiens
ggucgugucccagugcggc

SEQ ID NO: 4996 - RNA, 19 nt, Homo sapiens
aggucgugucccagugcgg

SEQ ID NO: 4997 - RNA, 19 nt, Homo sapiens
caggucgugucccagugcg

SEQ ID NO: 4998 - RNA, 19 nt, Homo sapiens
ccaggucgugucccagugc

SEQ ID NO: 4999 - RNA, 19 nt, Homo sapiens
uccaggucgugucccagug

SEQ ID NO: 5000 - RNA, 19 nt, Homo sapiens
guccaggucgugucccagu

SEQ ID NO: 5001 - RNA, 19 nt, Homo sapiens
cguccaggucgugucccag

SEQ ID NO: 5002 - RNA, 19 nt, Homo sapiens
ccguccaggucguguccca

SEQ ID NO: 5003 - RNA, 19 nt, Homo sapiens
cccguccaggucguguccc

SEQ ID NO: 5004 - RNA, 19 nt, Homo sapiens
gcccguccaggucgugucc

SEQ ID NO: 5005 - RNA, 19 nt, Homo sapiens
ugcccguccaggucguguc

SEQ ID NO: 5006 - RNA, 19 nt, Homo sapiens
cugcccguccaggucgugu

SEQ ID NO: 5007 - RNA, 19 nt, Homo sapiens
ccugcccguccaggucgug

SEQ ID NO: 5008 - RNA, 19 nt, Homo sapiens
uccugcccguccaggucgu

SEQ ID NO: 5009 - RNA, 19 nt, Homo sapiens
guccugcccguccaggucg

SEQ ID NO: 5010 - RNA, 19 nt, Homo sapiens
cguccugcccguccagguc

SEQ ID NO: 5011 - RNA, 19 nt, Homo sapiens
gcguccugcccguccaggu

SEQ ID NO: 5012 - RNA, 19 nt, Homo sapiens
cgcguccugcccguccagg

SEQ ID NO: 5013 - RNA, 19 nt, Homo sapiens
ccgcguccugcccguccag

SEQ ID NO: 5014 - RNA, 19 nt, Homo sapiens
uccgcguccugcccgucca

SEQ ID NO: 5015 - RNA, 19 nt, Homo sapiens
auccgcguccugcccgucc

SEQ ID NO: 5016 - RNA, 19 nt, Homo sapiens
cauccgcguccugcccguc

SEQ ID NO: 5017 - RNA, 19 nt, Homo sapiens
ucauccgcguccugcccgu

SEQ ID NO: 5018 - RNA, 19 nt, Homo sapiens
cucauccgcguccugcccg

SEQ ID NO: 5019 - RNA, 19 nt, Homo sapiens
ccucauccgcguccugccc

SEQ ID NO: 5020 - RNA, 19 nt, Homo sapiens
uccucauccgcguccugcc

SEQ ID NO: 5021 - RNA, 19 nt, Homo sapiens
auccucauccgcguccugc

SEQ ID NO: 5022 - RNA, 19 nt, Homo sapiens
cauccucauccgcguccug

SEQ ID NO: 5023 - RNA, 19 nt, Homo sapiens
gcauccucauccgcguccu

SEQ ID NO: 5024 - RNA, 19 nt, Homo sapiens
ggcauccucauccgcgucc

SEQ ID NO: 5025 - RNA, 19 nt, Homo sapiens
aucugcauacugcuguccc

SEQ ID NO: 5026 - RNA, 19 nt, Homo sapiens
caucugcauacugcugucc

SEQ ID NO: 5027 - RNA, 19 nt, Homo sapiens
ucaucugcauacugcuguc

SEQ ID NO: 5028 - RNA, 19 nt, Homo sapiens
gucaucugcauacugcugu

SEQ ID NO: 5029 - RNA, 19 nt, Homo sapiens
agucaucugcauacugcug

SEQ ID NO: 5030 - RNA, 19 nt, Homo sapiens
cagucaucugcauacugcu

SEQ ID NO: 5031 - RNA, 19 nt, Homo sapiens
ccagucaucugcauacugc

SEQ ID NO: 5032 - RNA, 19 nt, Homo sapiens
uccagucaucugcauacug

SEQ ID NO: 5033 - RNA, 19 nt, Homo sapiens
auccagucaucugcauacu

SEQ ID NO: 5034 - RNA, 19 nt, Homo sapiens
cauccagucaucugcauac

SEQ ID NO: 5035 - RNA, 19 nt, Homo sapiens
ccauccagucaucugcaua

SEQ ID NO: 5036 - RNA, 19 nt, Homo sapiens
ccgaggaggccgggcuggg

SEQ ID NO: 5037 - RNA, 19 nt, Homo sapiens
gccgaggaggccgggcugg

SEQ ID NO: 5038 - RNA, 19 nt, Homo sapiens
ggccgaggaggccgggcug

SEQ ID NO: 5039 - RNA, 19 nt, Homo sapiens
aggccgaggaggccgggcu

SEQ ID NO: 5040 - RNA, 19 nt, Homo sapiens
gaggccgaggaggccgggc

SEQ ID NO: 5041 - RNA, 19 nt, Homo sapiens
ggaggccgaggaggccggg

SEQ ID NO: 5042 - RNA, 19 nt, Homo sapiens
uggaggccgaggaggccgg

SEQ ID NO: 5043 - RNA, 19 nt, Homo sapiens
auggaggccgaggaggccg

SEQ ID NO: 5044 - RNA, 19 nt, Homo sapiens
uauggaggccgaggaggcc

SEQ ID NO: 5045 - RNA, 19 nt, Homo sapiens
guauggaggccgaggaggc

SEQ ID NO: 5046 - RNA, 19 nt, Homo sapiens
gguauggaggccgaggagg

SEQ ID NO: 5047 - RNA, 19 nt, Homo sapiens
ggguauggaggccgaggag

SEQ ID NO: 5048 - RNA, 19 nt, Homo sapiens
aggguauggaggccgagga

SEQ ID NO: 5049 - RNA, 19 nt, Homo sapiens
gaggguauggaggccgagg

SEQ ID NO: 5050 - RNA, 19 nt, Homo sapiens
ggaggguauggaggccgag

SEQ ID NO: 5051 - RNA, 19 nt, Homo sapiens
aggaggguauggaggccga

SEQ ID NO: 5052 - RNA, 19 nt, Homo sapiens
uaggaggguauggaggccg

SEQ ID NO: 5053 - RNA, 19 nt, Homo sapiens
cuaggaggguauggaggcc

SEQ ID NO: 5054 - RNA, 19 nt, Homo sapiens
ucuaggaggguauggaggc

SEQ ID NO: 5055 - RNA, 19 nt, Homo sapiens
uucuaggaggguauggagg

SEQ ID NO: 5056 - RNA, 19 nt, Homo sapiens
cuucuaggaggguauggag

SEQ ID NO: 5057 - RNA, 19 nt, Homo sapiens
ccuucuaggaggguaugga

SEQ ID NO: 5058 - RNA, 19 nt, Homo sapiens
cccuucuaggaggguaugg

SEQ ID NO: 5059 - RNA, 19 nt, Homo sapiens
ucccuucuaggaggguaug

SEQ ID NO: 5060 - RNA, 19 nt, Homo sapiens
aucccuucuaggaggguau

SEQ ID NO: 5061 - RNA, 19 nt, Homo sapiens
caucccuucuaggagggua

SEQ ID NO: 5062 - RNA, 19 nt, Homo sapiens
ccaucccuucuaggagggu

SEQ ID NO: 5063 - RNA, 19 nt, Homo sapiens
accaucccuucuaggaggg

SEQ ID NO: 5064 - RNA, 19 nt, Homo sapiens
aaccaucccuucuaggagg

SEQ ID NO: 5065 - RNA, 19 nt, Homo sapiens
gaaccaucccuucuaggag

SEQ ID NO: 5066 - RNA, 19 nt, Homo sapiens
agaaccaucccuucuagga

SEQ ID NO: 5067 - RNA, 19 nt, Homo sapiens
cagaaccaucccuucuagg

SEQ ID NO: 5068 - RNA, 19 nt, Homo sapiens
ccagaaccaucccuucuag

SEQ ID NO: 5069 - RNA, 19 nt, Homo sapiens
cccagaaccaucccuucua

SEQ ID NO: 5070 - RNA, 19 nt, Homo sapiens
gguuguagcgggcacugcc

SEQ ID NO: 5071 - RNA, 19 nt, Homo sapiens
ugguuguagcgggcacugc

SEQ ID NO: 5072 - RNA, 19 nt, Homo sapiens
cugguuguagcgggcacug

SEQ ID NO: 5073 - RNA, 19 nt, Homo sapiens
ccugguuguagcgggcacu

SEQ ID NO: 5074 - RNA, 19 nt, Homo sapiens
cccugguuguagcgggcac

SEQ ID NO: 5075 - RNA, 19 nt, Homo sapiens
gcccugguuguagcgggca

SEQ ID NO: 5076 - RNA, 19 nt, Homo sapiens
ggcccugguuguagcgggc

SEQ ID NO: 5077 - RNA, 19 nt, Homo sapiens
cggcccugguuguagcggg

SEQ ID NO: 5078 - RNA, 19 nt, Homo sapiens
ccggcccugguuguagcgg

SEQ ID NO: 5079 - RNA, 19 nt, Homo sapiens
uccggcccugguuguagcg

SEQ ID NO: 5080 - RNA, 19 nt, Homo sapiens
cuccggcccugguuguagc

SEQ ID NO: 5081 - RNA, 19 nt, Homo sapiens
gcuccggcccugguuguag

SEQ ID NO: 5082 - RNA, 19 nt, Homo sapiens
ugcuccggcccugguugua

SEQ ID NO: 5083 - RNA, 19 nt, Homo sapiens
cugcuccggcccugguugu

SEQ ID NO: 5084 - RNA, 19 nt, Homo sapiens
ccugcuccggcccugguug

SEQ ID NO: 5085 - RNA, 19 nt, Homo sapiens
uccugcuccggcccugguu

SEQ ID NO: 5086 - RNA, 19 nt, Homo sapiens
cuccugcuccggcccuggu

SEQ ID NO: 5087 - RNA, 19 nt, Homo sapiens
acuccugcuccggcccugg

SEQ ID NO: 5088 - RNA, 19 nt, Homo sapiens
cacuccugcuccggcccug

SEQ ID NO: 5089 - RNA, 19 nt, Homo sapiens
ccacuccugcuccggcccu

SEQ ID NO: 5090 - RNA, 19 nt, Homo sapiens
cccacuccugcuccggccc

SEQ ID NO: 5091 - RNA, 19 nt, Homo sapiens
ggaugguuugggugugaaa

SEQ ID NO: 5092 - RNA, 19 nt, Homo sapiens
aggaugguuugggugugaa

SEQ ID NO: 5093 - RNA, 19 nt, Homo sapiens
gaggaugguuuggguguga

SEQ ID NO: 5094 - RNA, 19 nt, Homo sapiens
ugaggaugguuugggugug

SEQ ID NO: 5095 - RNA, 19 nt, Homo sapiens
augaggaugguuugggugu

SEQ ID NO: 5096 - RNA, 19 nt, Homo sapiens
aaugaggaugguuugggug

SEQ ID NO: 5097 - RNA, 19 nt, Homo sapiens
gaaugaggaugguuugggu

SEQ ID NO: 5098 - RNA, 19 nt, Homo sapiens
agaaugaggaugguuuggg

SEQ ID NO: 5099 - RNA, 19 nt, Homo sapiens
gagaaugaggaugguuugg

SEQ ID NO: 5100 - RNA, 19 nt, Homo sapiens
agagaaugaggaugguuug

SEQ ID NO: 5101 - RNA, 19 nt, Homo sapiens
gagagaaugaggaugguuu

SEQ ID NO: 5102 - RNA, 19 nt, Homo sapiens
ggagagaaugaggaugguu

SEQ ID NO: 5103 - RNA, 19 nt, Homo sapiens
gggagagaaugaggauggu

SEQ ID NO: 5104 - RNA, 19 nt, Homo sapiens
agggagagaaugaggaugg

SEQ ID NO: 5105 - RNA, 19 nt, Homo sapiens
gagggagagaaugaggaug

SEQ ID NO: 5106 - RNA, 19 nt, Homo sapiens
agagggagagaaugaggau

SEQ ID NO: 5107 - RNA, 19 nt, Homo sapiens
gagagggagagaaugagga

SEQ ID NO: 5108 - RNA, 19 nt, Homo sapiens
ugagagggagagaaugagg

SEQ ID NO: 5109 - RNA, 19 nt, Homo sapiens
cugagagggagagaaugag

SEQ ID NO: 5110 - RNA, 19 nt, Homo sapiens
gcugagagggagagaauga

SEQ ID NO: 5111 - RNA, 19 nt, Homo sapiens
ggcugagagggagagaaug

SEQ ID NO: 5112 - RNA, 19 nt, Homo sapiens
gggcugagagggagagaau

SEQ ID NO: 5113 - RNA, 19 nt, Homo sapiens
agggcugagagggagagaa

SEQ ID NO: 5114 - RNA, 19 nt, Homo sapiens
cagggcugagagggagaga

SEQ ID NO: 5115 - RNA, 19 nt, Homo sapiens
ccagggcugagagggagag

SEQ ID NO: 5116 - RNA, 19 nt, Homo sapiens
ucgagguccaagcagggcc

SEQ ID NO: 5117 - RNA, 19 nt, Homo sapiens
aucgagguccaagcagggc

SEQ ID NO: 5118 - RNA, 19 nt, Homo sapiens
uaucgagguccaagcaggg

SEQ ID NO: 5119 - RNA, 19 nt, Homo sapiens
uuaucgagguccaagcagg

SEQ ID NO: 5120 - RNA, 19 nt, Homo sapiens
guuaucgagguccaagcag

SEQ ID NO: 5121 - RNA, 19 nt, Homo sapiens
cguuaucgagguccaagca

SEQ ID NO: 5122 - RNA, 19 nt, Homo sapiens
ccguuaucgagguccaagc

SEQ ID NO: 5123 - RNA, 19 nt, Homo sapiens
cccguuaucgagguccaag

SEQ ID NO: 5124 - RNA, 19 nt, Homo sapiens
uucugaugcuagggcaccc

SEQ ID NO: 5125 - RNA, 19 nt, Homo sapiens
cuucugaugcuagggcacc

SEQ ID NO: 5126 - RNA, 19 nt, Homo sapiens
ccuucugaugcuagggcac

SEQ ID NO: 5127 - RNA, 19 nt, Homo sapiens
cccuucugaugcuagggca

SEQ ID NO: 5128 - RNA, 19 nt, Homo sapiens
acccuucugaugcuagggc

SEQ ID NO: 5129 - RNA, 19 nt, Homo sapiens
aacccuucugaugcuaggg

SEQ ID NO: 5130 - RNA, 19 nt, Homo sapiens
gaacccuucugaugcuagg

SEQ ID NO: 5131 - RNA, 19 nt, Homo sapiens
ugaacccuucugaugcuag

SEQ ID NO: 5132 - RNA, 19 nt, Homo sapiens
augaacccuucugaugcua

SEQ ID NO: 5133 - RNA, 19 nt, Homo sapiens
caugaacccuucugaugcu

SEQ ID NO: 5134 - RNA, 19 nt, Homo sapiens
ccaugaacccuucugaugc

SEQ ID NO: 5135 - RNA, 19 nt, Homo sapiens
ucuacccucucugcagccc

SEQ ID NO: 5136 - RNA, 19 nt, Homo sapiens
cucuacccucucugcagcc

SEQ ID NO: 5137 - RNA, 19 nt, Homo sapiens
ucucuacccucucugcagc

SEQ ID NO: 5138 - RNA, 19 nt, Homo sapiens
uucucuacccucucugcag

SEQ ID NO: 5139 - RNA, 19 nt, Homo sapiens
cuucucuacccucucugca

SEQ ID NO: 5140 - RNA, 19 nt, Homo sapiens
ccuucucuacccucucugc

SEQ ID NO: 5141 - RNA, 19 nt, Homo sapiens
cccuucucuacccucucug

SEQ ID NO: 5142 - RNA, 19 nt, Homo sapiens
ucccuucucuacccucucu

SEQ ID NO: 5143 - RNA, 19 nt, Homo sapiens
gucccuucucuacccucuc

SEQ ID NO: 5144 - RNA, 19 nt, Homo sapiens
agucccuucucuacccucu

SEQ ID NO: 5145 - RNA, 19 nt, Homo sapiens
aagucccuucucuacccuc

SEQ ID NO: 5146 - RNA, 19 nt, Homo sapiens
aaagucccuucucuacccu

SEQ ID NO: 5147 - RNA, 19 nt, Homo sapiens
caaagucccuucucuaccc

SEQ ID NO: 5148 - RNA, 19 nt, Homo sapiens
gcaaagucccuucucuacc

SEQ ID NO: 5149 - RNA, 19 nt, Homo sapiens
ugcaaagucccuucucuac

SEQ ID NO: 5150 - RNA, 19 nt, Homo sapiens
cugcaaagucccuucucua

SEQ ID NO: 5151 - RNA, 19 nt, Homo sapiens
ccugcaaagucccuucucu

SEQ ID NO: 5152 - RNA, 19 nt, Homo sapiens
accugcaaagucccuucuc

SEQ ID NO: 5153 - RNA, 19 nt, Homo sapiens
caccugcaaagucccuucu

SEQ ID NO: 5154 - RNA, 19 nt, Homo sapiens
ucaccugcaaagucccuuc

SEQ ID NO: 5155 - RNA, 19 nt, Homo sapiens
uucaccugcaaagucccuu

SEQ ID NO: 5156 - RNA, 19 nt, Homo sapiens
auucaccugcaaagucccu

SEQ ID NO: 5157 - RNA, 19 nt, Homo sapiens
cauucaccugcaaaguccc

SEQ ID NO: 5158 - RNA, 19 nt, Homo sapiens
ccauucaccugcaaagucc

SEQ ID NO: 5159 - RNA, 19 nt, Homo sapiens
ccacccaccucugaugaaa

SEQ ID NO: 5160 - RNA, 19 nt, Homo sapiens
cccacccaccucugaugaa

SEQ ID NO: 5161 - RNA, 19 nt, Homo sapiens
acccacccaccucugauga

SEQ ID NO: 5162 - RNA, 19 nt, Homo sapiens
cacccacccaccucugaug

SEQ ID NO: 5163 - RNA, 19 nt, Homo sapiens
acacccacccaccucugau

SEQ ID NO: 5164 - RNA, 19 nt, Homo sapiens
aacacccacccaccucuga

SEQ ID NO: 5165 - RNA, 19 nt, Homo sapiens
gaacacccacccaccucug

SEQ ID NO: 5166 - RNA, 19 nt, Homo sapiens
ugaacacccacccaccucu

SEQ ID NO: 5167 - RNA, 19 nt, Homo sapiens
gugaacacccacccaccuc

SEQ ID NO: 5168 - RNA, 19 nt, Homo sapiens
ugugaacacccacccaccu

SEQ ID NO: 5169 - RNA, 19 nt, Homo sapiens
uugugaacacccacccacc

SEQ ID NO: 5170 - RNA, 19 nt, Homo sapiens
auugugaacacccacccac

SEQ ID NO: 5171 - RNA, 19 nt, Homo sapiens
uauugugaacacccaccca

SEQ ID NO: 5172 - RNA, 19 nt, Homo sapiens
auauugugaacacccaccc

SEQ ID NO: 5173 - RNA, 19 nt, Homo sapiens
aauauugugaacacccacc

SEQ ID NO: 5174 - RNA, 19 nt, Homo sapiens
aaauauugugaacacccac

SEQ ID NO: 5175 - RNA, 19 nt, Homo sapiens
uaaauauugugaacaccca

SEQ ID NO: 5176 - RNA, 19 nt, Homo sapiens
auaaauauugugaacaccc

SEQ ID NO: 5177 - RNA, 19 nt, Homo sapiens
aauaaauauugugaacacc

SEQ ID NO: 5178 - RNA, 19 nt, Homo sapiens
aaauaaauauugugaacac

SEQ ID NO: 5179 - RNA, 19 nt, Homo sapiens
cucccauuaccaaaugaaa

SEQ ID NO: 5180 - RNA, 19 nt, Homo sapiens
ccucccauuaccaaaugaa

SEQ ID NO: 5181 - RNA, 19 nt, Homo sapiens
cccucccauuaccaaauga

SEQ ID NO: 5182 - RNA, 19 nt, Homo sapiens
cccuccuaaauaaauaccc

SEQ ID NO: 5183 - RNA, 19 nt, Homo sapiens
ucccuccuaaauaaauacc

SEQ ID NO: 5184 - RNA, 19 nt, Homo sapiens
cucccuccuaaauaaauac

SEQ ID NO: 5185 - RNA, 19 nt, Homo sapiens
acucccuccuaaauaaaua

SEQ ID NO: 5186 - RNA, 19 nt, Homo sapiens
cacucccuccuaaauaaau

SEQ ID NO: 5187 - RNA, 19 nt, Homo sapiens
acacucccuccuaaauaaa

SEQ ID NO: 5188 - RNA, 19 nt, Homo sapiens
cacacucccuccuaaauaa

SEQ ID NO: 5189 - RNA, 19 nt, Homo sapiens
ccacacucccuccuaaaua

SEQ ID NO: 5190 - RNA, 19 nt, Homo sapiens
accacacucccuccuaaau

SEQ ID NO: 5191 - RNA, 19 nt, Homo sapiens
aaccacacucccuccuaaa

SEQ ID NO: 5192 - RNA, 19 nt, Homo sapiens
aaaccacacucccuccuaa

SEQ ID NO: 5193 - RNA, 19 nt, Homo sapiens
gaaaccacacucccuccua

SEQ ID NO: 5194 - RNA, 19 nt, Homo sapiens
ggaaaccacacucccuccu

SEQ ID NO: 5195 - RNA, 19 nt, Homo sapiens
aggaaaccacacucccucc

SEQ ID NO: 5196 - RNA, 19 nt, Homo sapiens
aaggaaaccacacucccuc

SEQ ID NO: 5197 - RNA, 19 nt, Homo sapiens
uaaggaaaccacacucccu

SEQ ID NO: 5198 - RNA, 19 nt, Homo sapiens
cuaaggaaaccacacuccc

SEQ ID NO: 5199 - RNA, 19 nt, Homo sapiens
ucuaaggaaaccacacucc

SEQ ID NO: 5200 - RNA, 19 nt, Homo sapiens
uucuaaggaaaccacacuc

SEQ ID NO: 5201 - RNA, 19 nt, Homo sapiens
cuucuaaggaaaccacacu

SEQ ID NO: 5202 - RNA, 19 nt, Homo sapiens
ccuucuaaggaaaccacac

SEQ ID NO: 5203 - RNA, 19 nt, Homo sapiens
accuucuaaggaaaccaca

SEQ ID NO: 5204 - RNA, 19 nt, Homo sapiens
uaccuucuaaggaaaccac

SEQ ID NO: 5205 - RNA, 19 nt, Homo sapiens
auaccuucuaaggaaacca

SEQ ID NO: 5206 - RNA, 19 nt, Homo sapiens
uauaccuucuaaggaaacc

SEQ ID NO: 5207 - RNA, 19 nt, Homo sapiens
cuauaccuucuaaggaaac

SEQ ID NO: 5208 - RNA, 19 nt, Homo sapiens
acuauaccuucuaaggaaa

SEQ ID NO: 5209 - RNA, 19 nt, Homo sapiens
gacuauaccuucuaaggaa

SEQ ID NO: 5210 - RNA, 19 nt, Homo sapiens
agacuauaccuucuaagga

SEQ ID NO: 5211 - RNA, 19 nt, Homo sapiens
gagacuauaccuucuaagg

SEQ ID NO: 5212 - RNA, 19 nt, Homo sapiens
agagacuauaccuucuaag

SEQ ID NO: 5213 - RNA, 19 nt, Homo sapiens
uagagacuauaccuucuaa

SEQ ID NO: 5214 - RNA, 19 nt, Homo sapiens
cuagagacuauaccuucua

SEQ ID NO: 5215 - RNA, 19 nt, Homo sapiens
gcuagagacuauaccuucu

SEQ ID NO: 5216 - RNA, 19 nt, Homo sapiens
ggcuagagacuauaccuuc

SEQ ID NO: 5217 - RNA, 19 nt, Homo sapiens
gggcuagagacuauaccuu

SEQ ID NO: 5218 - RNA, 19 nt, Homo sapiens
agggcuagagacuauaccu

SEQ ID NO: 5219 - RNA, 19 nt, Homo sapiens
gagggcuagagacuauacc

SEQ ID NO: 5220 - RNA, 19 nt, Homo sapiens
agagggcuagagacuauac

SEQ ID NO: 5221 - RNA, 19 nt, Homo sapiens
uagagggcuagagacuaua

SEQ ID NO: 5222 - RNA, 19 nt, Homo sapiens
uuagagggcuagagacuau

SEQ ID NO: 5223 - RNA, 19 nt, Homo sapiens
cuuagagggcuagagacua

SEQ ID NO: 5224 - RNA, 19 nt, Homo sapiens
ccuuagagggcuagagacu

SEQ ID NO: 5225 - RNA, 19 nt, Homo sapiens
gccuuagagggcuagagac

SEQ ID NO: 5226 - RNA, 19 nt, Homo sapiens
agccuuagagggcuagaga

SEQ ID NO: 5227 - RNA, 19 nt, Homo sapiens
cagccuuagagggcuagag

SEQ ID NO: 5228 - RNA, 19 nt, Homo sapiens
ccagccuuagagggcuaga

SEQ ID NO: 5229 - RNA, 19 nt, Homo sapiens
cccagccuuagagggcuag

SEQ ID NO: 5230 - RNA, 19 nt, Homo sapiens
aacucuaaacuccucauuu

SEQ ID NO: 5231 - RNA, 19 nt, Homo sapiens
caacucuaaacuccucauu

SEQ ID NO: 5232 - RNA, 19 nt, Homo sapiens
gcaacucuaaacuccucau

SEQ ID NO: 5233 - RNA, 19 nt, Homo sapiens
ugcaacucuaaacuccuca

SEQ ID NO: 5234 - RNA, 19 nt, Homo sapiens
cugcaacucuaaacuccuc

SEQ ID NO: 5235 - RNA, 19 nt, Homo sapiens
gcugcaacucuaaacuccu

SEQ ID NO: 5236 - RNA, 19 nt, Homo sapiens
agcugcaacucuaaacucc

SEQ ID NO: 5237 - RNA, 19 nt, Homo sapiens
cagcugcaacucuaaacuc

SEQ ID NO: 5238 - RNA, 19 nt, Homo sapiens
ccagcugcaacucuaaacu

SEQ ID NO: 5239 - RNA, 19 nt, Homo sapiens
cccagcugcaacucuaaac

SEQ ID NO: 5240 - RNA, 19 nt, Homo sapiens
uccaacuuccuucaaaccc

SEQ ID NO: 5241 - RNA, 19 nt, Homo sapiens
uuccaacuuccuucaaacc

SEQ ID NO: 5242 - RNA, 19 nt, Homo sapiens
cuuccaacuuccuucaaac

SEQ ID NO: 5243 - RNA, 19 nt, Homo sapiens
acuuccaacuuccuucaaa

SEQ ID NO: 5244 - RNA, 19 nt, Homo sapiens
cacuuccaacuuccuucaa

SEQ ID NO: 5245 - RNA, 19 nt, Homo sapiens
ccacuuccaacuuccuuca

SEQ ID NO: 5246 - RNA, 19 nt, Homo sapiens
cccacuuccaacuuccuuc

SEQ ID NO: 5247 - RNA, 19 nt, Homo sapiens
uuucugagaccagaugccc

SEQ ID NO: 5248 - RNA, 19 nt, Homo sapiens
auuucugagaccagaugcc

SEQ ID NO: 5249 - RNA, 19 nt, Homo sapiens
cauuucugagaccagaugc

SEQ ID NO: 5250 - RNA, 19 nt, Homo sapiens
ccauuucugagaccagaug

SEQ ID NO: 5251 - RNA, 19 nt, Homo sapiens
uccauuucugagaccagau

SEQ ID NO: 5252 - RNA, 19 nt, Homo sapiens
guccauuucugagaccaga

SEQ ID NO: 5253 - RNA, 19 nt, Homo sapiens
gguccauuucugagaccag

SEQ ID NO: 5254 - RNA, 19 nt, Homo sapiens
ugguccauuucugagacca

SEQ ID NO: 5255 - RNA, 19 nt, Homo sapiens
cugguccauuucugagacc

SEQ ID NO: 5256 - RNA, 19 nt, Homo sapiens
gcugguccauuucugagac

SEQ ID NO: 5257 - RNA, 19 nt, Homo sapiens
agcugguccauuucugaga

SEQ ID NO: 5258 - RNA, 19 nt, Homo sapiens
cagcugguccauuucugag

SEQ ID NO: 5259 - RNA, 19 nt, Homo sapiens
ccagcugguccauuucuga

SEQ ID NO: 5260 - RNA, 19 nt, Homo sapiens
uccagcugguccauuucug

SEQ ID NO: 5261 - RNA, 19 nt, Homo sapiens
auccagcugguccauuucu

SEQ ID NO: 5262 - RNA, 19 nt, Homo sapiens
cauccagcugguccauuuc

SEQ ID NO: 5263 - RNA, 19 nt, Homo sapiens
gcauccagcugguccauuu

SEQ ID NO: 5264 - RNA, 19 nt, Homo sapiens
ugcauccagcugguccauu

SEQ ID NO: 5265 - RNA, 19 nt, Homo sapiens
cugcauccagcugguccau

SEQ ID NO: 5266 - RNA, 19 nt, Homo sapiens
ccugcauccagcuggucca

SEQ ID NO: 5267 - RNA, 19 nt, Homo sapiens
cccugcauccagcuggucc

SEQ ID NO: 5268 - RNA, 19 nt, Homo sapiens
gcccugcauccagcugguc

SEQ ID NO: 5269 - RNA, 19 nt, Homo sapiens
ugcccugcauccagcuggu

SEQ ID NO: 5270 - RNA, 19 nt, Homo sapiens
cugcccugcauccagcugg

SEQ ID NO: 5271 - RNA, 19 nt, Homo sapiens
ccugcccugcauccagcug

SEQ ID NO: 5272 - RNA, 19 nt, Homo sapiens
cccugcccugcauccagcu

SEQ ID NO: 5273 - RNA, 19 nt, Homo sapiens
cucaagcacccucaguccc

SEQ ID NO: 5274 - RNA, 19 nt, Homo sapiens
acucaagcacccucagucc

SEQ ID NO: 5275 - RNA, 19 nt, Homo sapiens
uacucaagcacccucaguc

SEQ ID NO: 5276 - RNA, 19 nt, Homo sapiens
cuacucaagcacccucagu

SEQ ID NO: 5277 - RNA, 19 nt, Homo sapiens
ccuacucaagcacccucag

SEQ ID NO: 5278 - RNA, 19 nt, Homo sapiens
uccuacucaagcacccuca

SEQ ID NO: 5279 - RNA, 19 nt, Homo sapiens
auccuacucaagcacccuc

SEQ ID NO: 5280 - RNA, 19 nt, Homo sapiens
cauccuacucaagcacccu

SEQ ID NO: 5281 - RNA, 19 nt, Homo sapiens
acauccuacucaagcaccc

SEQ ID NO: 5282 - RNA, 19 nt, Homo sapiens
cacauccuacucaagcacc

SEQ ID NO: 5283 - RNA, 19 nt, Homo sapiens
ucacauccuacucaagcac

SEQ ID NO: 5284 - RNA, 19 nt, Homo sapiens
cucacauccuacucaagca

SEQ ID NO: 5285 - RNA, 19 nt, Homo sapiens
ucucacauccuacucaagc

SEQ ID NO: 5286 - RNA, 19 nt, Homo sapiens
gucucacauccuacucaag

SEQ ID NO: 5287 - RNA, 19 nt, Homo sapiens
agucucacauccuacucaa

SEQ ID NO: 5288 - RNA, 19 nt, Homo sapiens
aagucucacauccuacuca

SEQ ID NO: 5289 - RNA, 19 nt, Homo sapiens
gaagucucacauccuacuc

SEQ ID NO: 5290 - RNA, 19 nt, Homo sapiens
ugaagucucacauccuacu

SEQ ID NO: 5291 - RNA, 19 nt, Homo sapiens
augaagucucacauccuac

SEQ ID NO: 5292 - RNA, 19 nt, Homo sapiens
caugaagucucacauccua

SEQ ID NO: 5293 - RNA, 19 nt, Homo sapiens
ccaugaagucucacauccu

SEQ ID NO: 5294 - RNA, 19 nt, Homo sapiens
cccaugaagucucacaucc

SEQ ID NO: 5295 - RNA, 19 nt, Homo sapiens
gcccaugaagucucacauc

SEQ ID NO: 5296 - RNA, 19 nt, Homo sapiens
ggcccaugaagucucacau

SEQ ID NO: 5297 - RNA, 19 nt, Homo sapiens
aggcccaugaagucucaca

SEQ ID NO: 5298 - RNA, 19 nt, Homo sapiens
caggcccaugaagucucac

SEQ ID NO: 5299 - RNA, 19 nt, Homo sapiens
ccaggcccaugaagucuca

SEQ ID NO: 5300 - RNA, 19 nt, Homo sapiens
cccaggcccaugaagucuc

SEQ ID NO: 5301 - RNA, 19 nt, Homo sapiens
acccaggcccaugaagucu

SEQ ID NO: 5302 - RNA, 19 nt, Homo sapiens
aacccaggcccaugaaguc

SEQ ID NO: 5303 - RNA, 19 nt, Homo sapiens
gaacccaggcccaugaagu

SEQ ID NO: 5304 - RNA, 19 nt, Homo sapiens
agaacccaggcccaugaag

SEQ ID NO: 5305 - RNA, 19 nt, Homo sapiens
cagaacccaggcccaugaa

SEQ ID NO: 5306 - RNA, 19 nt, Homo sapiens
acagaacccaggcccauga

SEQ ID NO: 5307 - RNA, 19 nt, Homo sapiens
aacagaacccaggcccaug

SEQ ID NO: 5308 - RNA, 19 nt, Homo sapiens
caacagaacccaggcccau

SEQ ID NO: 5309 - RNA, 19 nt, Homo sapiens
ucaacagaacccaggccca

SEQ ID NO: 5310 - RNA, 19 nt, Homo sapiens
cucaacagaacccaggccc

SEQ ID NO: 5311 - RNA, 19 nt, Homo sapiens
acucaacagaacccaggcc

SEQ ID NO: 5312 - RNA, 19 nt, Homo sapiens
aacucaacagaacccaggc

SEQ ID NO: 5313 - RNA, 19 nt, Homo sapiens
aaacucaacagaacccagg

SEQ ID NO: 5314 - RNA, 19 nt, Homo sapiens
uaagaaauugauacugaaa

SEQ ID NO: 5315 - RNA, 19 nt, Homo sapiens
uuaagaaauugauacugaa

SEQ ID NO: 5316 - RNA, 19 nt, Homo sapiens
uuuaagaaauugauacuga

SEQ ID NO: 5317 - RNA, 19 nt, Homo sapiens
guuuaagaaauugauacug

SEQ ID NO: 5318 - RNA, 19 nt, Homo sapiens
gguuuaagaaauugauacu

SEQ ID NO: 5319 - RNA, 19 nt, Homo sapiens
ugguuuaagaaauugauac

SEQ ID NO: 5320 - RNA, 19 nt, Homo sapiens
uugguuuaagaaauugaua

SEQ ID NO: 5321 - RNA, 19 nt, Homo sapiens
uuugguuuaagaaauugau

SEQ ID NO: 5322 - RNA, 19 nt, Homo sapiens
auuugguuuaagaaauuga

SEQ ID NO: 5323 - RNA, 19 nt, Homo sapiens
aauuugguuuaagaaauug

SEQ ID NO: 5324 - RNA, 19 nt, Homo sapiens
aaauuugguuuaagaaauu

SEQ ID NO: 5325 - RNA, 19 nt, Homo sapiens
ggucacgagaugagcaccc

SEQ ID NO: 5326 - RNA, 19 nt, Homo sapiens
aggucacgagaugagcacc

SEQ ID NO: 5327 - RNA, 19 nt, Homo sapiens
gaggucacgagaugagcac

SEQ ID NO: 5328 - RNA, 19 nt, Homo sapiens
agaggucacgagaugagca

SEQ ID NO: 5329 - RNA, 19 nt, Homo sapiens
cagaggucacgagaugagc

SEQ ID NO: 5330 - RNA, 19 nt, Homo sapiens
gcagaggucacgagaugag

SEQ ID NO: 5331 - RNA, 19 nt, Homo sapiens
ggcagaggucacgagauga

SEQ ID NO: 5332 - RNA, 19 nt, Homo sapiens
uugugaaggaugugggugg

SEQ ID NO: 5333 - RNA, 19 nt, Homo sapiens
uuugugaaggaugugggug

SEQ ID NO: 5334 - RNA, 19 nt, Homo sapiens
guuugugaaggaugugggu

SEQ ID NO: 5335 - RNA, 19 nt, Homo sapiens
aguuugugaaggauguggg

SEQ ID NO: 5336 - RNA, 19 nt, Homo sapiens
gaguuugugaaggaugugg

SEQ ID NO: 5337 - RNA, 19 nt, Homo sapiens
ggaguuugugaaggaugug

SEQ ID NO: 5338 - RNA, 19 nt, Homo sapiens
uggaguuugugaaggaugu

SEQ ID NO: 5339 - RNA, 19 nt, Homo sapiens
auggaguuugugaaggaug

SEQ ID NO: 5340 - RNA, 19 nt, Homo sapiens
cauggaguuugugaaggau

SEQ ID NO: 5341 - RNA, 19 nt, Homo sapiens
acauggaguuugugaagga

SEQ ID NO: 5342 - RNA, 19 nt, Homo sapiens
aacauggaguuugugaagg

SEQ ID NO: 5343 - RNA, 19 nt, Homo sapiens
aaacauggaguuugugaag

SEQ ID NO: 5344 - RNA, 19 nt, Homo sapiens
gaaacauggaguuugugaa

SEQ ID NO: 5345 - RNA, 19 nt, Homo sapiens
ugaaacauggaguuuguga

SEQ ID NO: 5346 - RNA, 19 nt, Homo sapiens
cugaaacauggaguuugug

SEQ ID NO: 5347 - RNA, 19 nt, Homo sapiens
acugaaacauggaguuugu

SEQ ID NO: 5348 - RNA, 19 nt, Homo sapiens
cacugaaacauggaguuug

SEQ ID NO: 5349 - RNA, 19 nt, Homo sapiens
acacugaaacauggaguuu

SEQ ID NO: 5350 - RNA, 19 nt, Homo sapiens
aacacugaaacauggaguu

SEQ ID NO: 5351 - RNA, 19 nt, Homo sapiens
aaacacugaaacauggagu

SEQ ID NO: 5352 - RNA, 19 nt, Homo sapiens
caaacacugaaacauggag

SEQ ID NO: 5353 - RNA, 19 nt, Homo sapiens
ucaaacacugaaacaugga

SEQ ID NO: 5354 - RNA, 19 nt, Homo sapiens
cucaaacacugaaacaugg

SEQ ID NO: 5355 - RNA, 19 nt, Homo sapiens
acucaaacacugaaacaug

SEQ ID NO: 5356 - RNA, 19 nt, Homo sapiens
gacucaaacacugaaacau

SEQ ID NO: 5357 - RNA, 19 nt, Homo sapiens
ggacucaaacacugaaaca

SEQ ID NO: 5358 - RNA, 19 nt, Homo sapiens
uggacucaaacacugaaac

SEQ ID NO: 5359 - RNA, 19 nt, Homo sapiens
auggacucaaacacugaaa

SEQ ID NO: 5360 - RNA, 19 nt, Homo sapiens
cauggacucaaacacugaa

SEQ ID NO: 5361 - RNA, 19 nt, Homo sapiens
acauggacucaaacacuga

SEQ ID NO: 5362 - RNA, 19 nt, Homo sapiens
aacauggacucaaacacug

SEQ ID NO: 5363 - RNA, 19 nt, Homo sapiens
aaacauggacucaaacacu

SEQ ID NO: 5364 - RNA, 19 nt, Homo sapiens
uaaacauggacucaaacac

SEQ ID NO: 5365 - RNA, 19 nt, Homo sapiens
auaaacauggacucaaaca

SEQ ID NO: 5366 - RNA, 19 nt, Homo sapiens
aauaaacauggacucaaac

SEQ ID NO: 5367 - RNA, 19 nt, Homo sapiens
gaauaaacauggacucaaa

SEQ ID NO: 5368 - RNA, 19 nt, Homo sapiens
agaauaaacauggacucaa

SEQ ID NO: 5369 - RNA, 19 nt, Homo sapiens
cagaauaaacauggacuca

SEQ ID NO: 5370 - RNA, 19 nt, Homo sapiens
gcagaauaaacauggacuc

SEQ ID NO: 5371 - RNA, 19 nt, Homo sapiens
ugcagaauaaacauggacu

SEQ ID NO: 5372 - RNA, 19 nt, Homo sapiens
uugcagaauaaacauggac

SEQ ID NO: 5373 - RNA, 19 nt, Homo sapiens
uuugcagaauaaacaugga

SEQ ID NO: 5374 - RNA, 19 nt, Homo sapiens
auuugcagaauaaacaugg

SEQ ID NO: 5375 - RNA, 19 nt, Homo sapiens
uauuugcagaauaaacaug

SEQ ID NO: 5376 - RNA, 19 nt, Homo sapiens
uuauuugcagaauaaacau

SEQ ID NO: 5377 - RNA, 19 nt, Homo sapiens
uuuauuugcagaauaaaca

SEQ ID NO: 5378 - RNA, 19 nt, Homo sapiens
auuuauuugcagaauaaac

SEQ ID NO: 5379 - RNA, 19 nt, Homo sapiens
cauuuauuugcagaauaaa

SEQ ID NO: 5380 - RNA, 19 nt, Homo sapiens
ccauuuauuugcagaauaa

SEQ ID NO: 5381 - RNA, 19 nt, Homo sapiens
accauuuauuugcagaaua

SEQ ID NO: 5382 - RNA, 19 nt, Homo sapiens
uaccauuuauuugcagaau

SEQ ID NO: 5383 - RNA, 19 nt, Homo sapiens
uuaccauuuauuugcagaa

SEQ ID NO: 5384 - RNA, 19 nt, Homo sapiens
auuaccauuuauuugcaga

SEQ ID NO: 5385 - RNA, 19 nt, Homo sapiens
cauuaccauuuauuugcag

SEQ ID NO: 5386 - RNA, 19 nt, Homo sapiens
acauuaccauuuauuugca

SEQ ID NO: 5387 - RNA, 19 nt, Homo sapiens
uacauuaccauuuauuugc

SEQ ID NO: 5388 - RNA, 19 nt, Homo sapiens
auacauuaccauuuauuug

SEQ ID NO: 5389 - RNA, 19 nt, Homo sapiens
aauacauuaccauuuauuu

SEQ ID NO: 5390 - RNA, 19 nt, Homo sapiens
caauacauuaccauuuauu

SEQ ID NO: 5391 - RNA, 19 nt, Homo sapiens
ccaauacauuaccauuuau

SEQ ID NO: 5392 - RNA, 19 nt, Homo sapiens
uccaauacauuaccauuua

1. A nanoparticle comprising a small interfering RNA (siRNA), wherein the siRNA comprises a sense region and anti-sense region complementary to said sense region such that the sense region and the anti-sense region together form an RNA duplex, and wherein the sense region comprises a sequence at least 70% identical to a glypican-2 (GPC2) mRNA sequence.

2. The nanoparticle of claim 1, wherein the sense region comprises a sequence that is identical to the GPC2 mRNA sequence.

3. The nanoparticle of claim 1, wherein the siRNA is capable of inducing RNAi-mediated degradation of the GPC2 mRNA.

4. The nanoparticle of claim 1, wherein the sense region is encoded by a first single stranded RNA molecule and the anti-sense region is encoded by a second single stranded RNA molecule.

5. The nanoparticle of claim 4, wherein the first single stranded RNA molecule comprises a first 3′ overhang and the second single stranded RNA molecule comprises a second 3′ overhang.

6.-8. (canceled)

9. The nanoparticle of claim 1, wherein the RNA duplex is between 17 and 24 nucleotides in length.

10. (canceled)

11. The nanoparticle of claim 1, wherein the GPC2 mRNA sequence comprises SEQ ID NO: 1 or SEQ ID NO: 2.

12.-13. (canceled)

14. The nanoparticle of claim 1, wherein the siRNA comprises a sequence selected from the group consisting of SEQ ID NOs: 3-232.

15. The nanoparticle of claim 1, wherein the sense region comprises a sequence of CCUGCUUGGACCUCGAUAA (SEQ ID NO: 3), CUCAGUAGCCCAGCACUCU (SEQ ID NO: 4) or CUCCUUUCUGGUUCACACA (SEQ ID NO: 5).

16. The nanoparticle of claim 1, wherein the sense region comprises a sequence of CCUGCUUGGACCUCGAUAA (SEQ ID NO: 3) and the anti-sense region comprises a sequence of UUAUCGAGGUCCAAGCAGG (SEQ ID NO: 6).

17. The nanoparticle of claim 1, wherein the sense region comprises a sequence of CUCAGUAGCCCAGCACUCU (SEQ ID NO: 4) and the anti-sense region comprises a sequence of AGAGUGCUGGGCUACUGAG (SEQ ID NO: 7).

18. The nanoparticle of claim 1, wherein the sense region comprises a sequence of CUCCUUUCUGGUUCACACA (SEQ ID NO: 5) and the anti-sense region comprises a sequence of UGUGUGAACCAGAAAGGAG (SEQ ID NO: 8).

19. The nanoparticle of claim 1, wherein the siRNA comprises at least one modified nucleotide.

20. The nanoparticle of claim 19, wherein the at least one modified nucleotide increases stability of the RNA duplex.

21. The nanoparticle of claim 19, wherein the at least one modified nucleotide comprises a locked nucleic acid (LNA).

22. The nanoparticle of claim 1, wherein the nanoparticle comprises a liposome, a micelle, a polymer-based nanoparticle, a lipid-polymer based nanoparticle, a nanocrystal, a carbon nanotube based nanoparticle or a polymeric micelle.

23. The nanoparticle of claim 22, wherein the polymer-based nanoparticle comprises a multiblock copolymer, a diblock copolymer, a polymeric micelle or a hyperbranched macromolecule.

24. The nanoparticle of claim 22, wherein the polymer-based nanoparticle comprises a multiblock copolymer or a diblock copolymer.

25. The nanoparticle of claim 23, wherein the polymer-based nanoparticle comprises a poly(lactic-co-glycolic acid) PLGA polymer.

26. The nanoparticle of claim 1, wherein the nanoparticle comprises a targeting agent.

27. (canceled)

28. The nanoparticle of claim 26, wherein the targeting agent is hyaluronic acid.

29. (canceled)

30. The nanoparticle of claim 1, wherein the nanoparticle comprises a chemotherapeutic agent.

31. The nanoparticle of claim 30, wherein the chemotherapeutic agent comprises a platinum based antineoplastic agent, a DNA alkylating agent, a DNA intercalating agent, or a topoisomerase inhibitor.

32.-35. (canceled)

36. A pharmaceutical composition comprising the nanoparticle of claim 1, and one or more of a pharmaceutically acceptable carrier, a diluent or an excipient.

37.-47. (canceled)

48. A kit comprising the nanoparticle of claim 1.

49. A kit comprising the pharmaceutical composition of claim 36.

50. (canceled)

51. A method of treating a cancer in a subject, comprising administering to the subject a therapeutically effective amount of the nanoparticle of claim 1 to the subject.

52. A method of treating cancer in a subject, comprising administering to the subject a therapeutically effective amount of the pharmaceutical composition of claim 36 to the subject.

53.-56. (canceled)

57. A method of treating a cancer in a subject, comprising administering to the subject a therapeutically effective amount of a composition comprising a nanoparticle, the nanoparticle comprising a small interfering RNA (siRNA), wherein the siRNA comprises a sense region and anti-sense region complementary to said sense region such that the sense region and the anti-sense region together form an RNA duplex, wherein the sense region comprises a sequence at least 70% identical to a glypican-2 (GPC2) mRNA sequence of SEQ ID NO: 1 or SEQ ID NO: 2.

58.-103. (canceled)
